(19) United States
(12) Patent Application Publication
(10) Pub. No.: US 2022/0064302 A1
(43) Pub. Date: Mar. 3, 2022

(54) Anti-PD-1 Binding Proteins and Methods of Use Thereof

(71) Applicant: GigaGen, Inc., South San Francisco, CA (US)

(72) Inventors: David Scott Johnson, San Francisco, CA (US); Adam Shultz Adler, Belmont, CA (US); Rena Aviva Mizrahi, Pacifica, CA (US); Yoong Wearn Lim, South San Francisco, CA (US); Michael Asensio, South San Francisco, CA (US)

(21) Appl. No.: 17/418,764

(22) PCT Filed: Dec. 27, 2019
(86) PCT No.: PCT/US2019/068824

§ 371 Date: Jun. 25, 2021

Related U.S. Application Data
(60) Provisional application No. 62/785,660, filed on Dec. 27, 2018.

(51) Int. Cl. C07K 16/28; A61K 45/06

(52) U.S. Cl. CPC C07K 16/2818; A61K 2039/505; A61K 45/06

(57) ABSTRACT

Provided herein are antigen-binding proteins (ABPs) that selectively bind to PD-1 and its isoforms and homologs, and compositions comprising the ABPs. Also provided are methods of using the ABPs, such as therapeutic and diagnostic methods.

### 1. CROSS REFERENCE TO RELATED APPLICATIONS

[0001] This application claims priority to and the benefit of U.S. Provisional Patent Application No. 62/785,660, filed on Dec. 27, 2018, the entire contents of which are incorporated by reference herein.

### 2. SEQUENCE LISTING

[0002] The instant application contains a Sequence Listing with 12221 sequences which has been submitted via EFS-Web and is hereby incorporated by reference in its entirety. Said ASCII copy, created on Dec. 20, 2019, is named GGN-011WO_SL.txt, and is 2,018,899 bytes in size.

### 3. FIELD

[0003] Provided herein are antigen-binding proteins (ABPs) with binding specificity for PD-1 and compositions comprising such ABPs, including pharmaceutical compositions, diagnostic compositions, and kits. Also provided are methods of making PD-1 ABPs, and methods of using PD-1 ABPs, for example, for therapeutic purposes, diagnostic purposes, and research purposes. 4. BACKGROUND

[0004] PD-1, also known as programmed cell death protein 1 and CD279 (cluster of differentiation 279), is a cell surface receptor that suppresses T cell inflammatory activity. PD-1 is expressed by immune cells including T cells, B cells, and macrophages. PD-L1, also expressed by the immune cells, is the primary ligand of PD-1. The interaction between PD-1 and PD-L1 is vitally important for downregulating the immune responses and promoting self-tolerance by suppressing T cell inflammatory activity. This activity prevents autoimmune diseases, as well as prevents the immune system from killing cancer cells.

[0005] Tumor cells hijack the PD-1/PD-L1 pathway by up-regulating PD-L1 and thus suppress the anti-tumor immune response. Recently, PD-1 inhibitors have been shown to antagonize PD-1/PD-L1 binding, thereby activating the immune system to attack tumors. PD-1 inhibitors have been therefore used with varying success to treat some types of cancer.

[0006] Suppression of PD-1 activity has been also found to reduce cerebral amyloid-β plagues and improve cognitive performance in animals. Blocking PD-1 activity was demonstrated to evoke an IFN-γ dependent immune response that recruited monocyte-derived macrophages to the brain that were then capable of clearing the amyloid-β plaques from the tissue. Thus, anti-PD-1 antibodies have been also suggested as therapeutics for treating Alzheimer's disease.

[0007] Thus, there is a need for developing PD-1 ABPs that can be used for treatment, diagnosis, and research of various diseases, including cancer and Alzheimer's disease.

### 5. SUMMARY

[0008] Provided herein are novel ABPs with binding specificity for PD-1 and methods of using such ABPs. The PD-1 is a human PD-1 (SEQ ID: 7001) or a fragment of the human PD-1.

[0009] The ABP can comprise an antibody. In some embodiments, the antibody is a monoclonal antibody. In some embodiments, the antibody is a chimeric antibody. In some embodiments, the antibody is a humanized antibody. In some embodiments, the antibody is a human antibody. In some embodiments, the ABP comprises an antibody fragment. In some embodiments, the ABP comprises an alternative scaffold. In some embodiments, the ABPs comprises a single-chain variable fragment (scFv).

[0010] The ABPs provided herein can induce various biological effects associated with inhibition of PD-1. In some embodiments, an ABP provided herein prevents binding between PD-1 and PD-L1. In some embodiments, an ABP provided herein prevents inhibition of an effector T cell. In some embodiments, the ABP co-stimulates an effector T cell. In some embodiments, the ABP inhibits the suppression of an effector T cell by a regulatory T cell. In some embodiments, the ABP increases the number of effector T cells in a tissue or in systemic circulation. In some embodiments, the tissue is a tumor. In some embodiments, the tissue is a tissue that is infected with a virus.

[0011] Also provided are kits comprising one or more of the pharmaceutical compositions comprising the ABPs, and instructions for use of the pharmaceutical composition.

[0012] Also provided are isolated polynucleotides encoding the ABPs provided herein, and portions thereof.

[0013] Also provided are vectors comprising such polynucleotides.

[0014] Also provided are recombinant host cells comprising such polynucleotides and recombinant host cells comprising such vectors.

[0015] Also provided are methods of producing the ABP using the polynucleotides, vectors, or host cells provided herein.

[0016] Also provided are pharmaceutical compositions comprising the ABPs and a pharmaceutically acceptable excipient.

[0017] More specifically, the present disclosure provides an isolated antigen binding protein (ABP) that specifically binds a human programmed cell death protein 1 (PD-1), comprising: (a) a CDR3-L having a sequence selected from SEQ ID NOS: 3001-3028 and a CDR3-H having a sequence selected from SEQ ID NOS: 6001-6028; or (b) a CDR3-L having a sequence selected from SEQ ID NOS: 10092-10614 and a CDR3-H having a sequence selected from SEQ ID NOS: 11661-12183; or (c) a CDR3-L having a sequence of the CD3-L of any one of the clones in the library deposited under ATCC Accession No. PTA-125509 and a CDR3-L having a sequence of the CD3-L of any one of the clones in the library deposited under ATCC Accession No. PTA-125509. In some embodiments, the CDR3-L and the CDR3-H are a cognate pair.

[0018] In some embodiments, the ABP comprises (a) a CDR1-L having a sequence selected from SEQ ID NOS: 1001-1028 and a CDR2-L having a sequence selected from SEQ ID NOS: 2001-2028; and a CDR1-H having a sequence selected from SEQ ID NOS: 4001-4028; and a CDR2-H having a sequence selected from SEQ ID NOS: 5001-5028; or (b) a CDR1-L having a sequence selected from SEQ ID NOS: 9046-9568; and a CDR2-L having a sequence selected from SEQ ID NOS: 9569-10091 and a CDR1-H having a sequence selected from SEQ ID NOS: 10615-11137; and a CDR2-H having a sequence selected from SEQ ID NOS: 11138-11660; or (c) a CDR1-L having a sequence selected from a CDR1-L of any one of the clones in the library deposited under ATCC Accession No. PTA-125509; and a CDR2-L having a sequence selected from a CDR2-L of any one of the clones in the library deposited under ATCC Accession No. PTA-125509; and a CDR1-H having a sequence selected from a CDR1-H of any one of the clones in the library deposited under ATCC Accession No. PTA-125509; and a CDR2-H having a sequence selected from a CDR2-H of any one of the clones in the library deposited under ATCC Accession No. PTA-125509.

[0019] In some embodiments, the ABP comprises a CDR1-L, a CDR2-L, a CDR3-L, a CDR1-H, a CDR2-H and a CDR3-H, wherein the CDR1-L consists of SEQ ID NO: 1001, the CDR2-L consists of SEQ ID NO: 2001, the CDR3-L consists of SEQ ID NO: 3001, the CDR1-H consists of SEQ ID NO: 4001, the CDR2-H consists of SEQ ID NO: 5001 and the CDR3-H consists of SEQ ID NO: 6001; or the CDR1-L consists of SEQ ID NO: 1002, CDR2-L consists of SEQ ID NO: 2002, the CDR3-L consists of SEQ ID NO: 3002, the CDR1-H consists of SEQ ID NO: 4002, the CDR2-H consists of SEQ ID NO: 5002 and the CDR3-H consists of SEQ ID NO: 6002; or the CDR1-L consists of SEQ ID NO: 1003, the CDR2-L consists of SEQ ID NO: 2003, the CDR3-L consists of SEQ ID NO: 3003, the CDR1-H consists of SEQ ID NO: 4003, the CDR2-H consists of SEQ ID NO: 5003 and the CDR3-H consists of SEQ ID NO: 6003; or the CDR1-L consists of SEQ ID NO: 1004, the CDR2-L consists of SEQ ID NO: 2004, the CDR3-L consists of SEQ ID NO: 3004, the CDR1-H consists of SEQ ID NO: 4004, the CDR2-H consists of SEQ ID NO: 5004 and the CDR3-H consists of SEQ ID NO: 6004; or the CDR1-L consists of SEQ ID NO: 1005, the CDR2-L consists of SEQ ID NO: 2005, the CDR3-L consists of SEQ ID NO: 3005, the CDR1-H consists of SEQ ID NO: 4005, the CDR2-H consists of SEQ ID NO: 5005 and the CDR3-H consists of SEQ ID NO: 6005; or the CDR1-L consists of SEQ ID NO: 1006, the CDR2-L consists of SEQ ID NO: 2006, the CDR3-L consists of SEQ ID NO: 3006, the CDR1-H consists of SEQ ID NO: 4006, the CDR2-H consists of SEQ ID NO: 5006 and the CDR3-H consists of SEQ ID NO: 6006; or the CDR1-L consists of SEQ ID NO: 1007, the CDR2-L consists of SEQ ID NO: 2007, the CDR3-L consists of SEQ ID NO: 3007, the CDR1-H consists of SEQ ID NO: 4007, the CDR2-H consists of SEQ ID NO: 5007 and the CDR3-H consists of SEQ ID NO: 6007; or the CDR1-L consists of SEQ ID NO: 1008, the CDR2-L consists of SEQ ID NO: 2008, the CDR3-L consists of SEQ ID NO: 3008, the CDR1-H consists of SEQ ID NO: 4008, the CDR2-H consists of SEQ ID NO: 5008 and the CDR3-H consists of SEQ ID NO: 6008 or the CDR1-L consists of SEQ ID NO: 1009, the CDR2-L consists of SEQ ID NO: 2009, the CDR3-L consists of SEQ ID NO: 3009, the CDR1-H consists of SEQ ID NO: 4009, the CDR2-H consists of SEQ ID NO: 5009 and the CDR3-H consists of SEQ ID NO: 6009; or the CDR1-L consists of SEQ ID NO: 1010, the CDR2-L consists of SEQ ID NO: 2010, the CDR3-L consists of SEQ ID NO: 3010, the CDR1-H consists of SEQ ID NO: 4010, the CDR2-H consists of SEQ ID NO: 5010 and the CDR3-H consists of SEQ ID NO: 6010; or the CDR1-L consists of SEQ ID NO: 1011, the CDR2-L consists of SEQ ID NO: 2011, the CDR3-L consists of SEQ ID NO: 3011, the CDR1-H consists of SEQ ID NO: 4011, the CDR2-H consists of SEQ ID NO: 5011 and the CDR3-H consists of SEQ ID NO: 6011; or the CDR1-L consists of SEQ ID NO: 1012, the CDR2-L consists of SEQ ID NO: 2012, the CDR3-L consists of SEQ ID NO: 3012, the CDR1-H consists of SEQ ID NO: 4012, the CDR2-H consists of SEQ ID NO: 5012 and the CDR3-H consists of SEQ ID NO: 6012; or the CDR1-L consists of SEQ ID NO: 1013, the CDR2-L consists of SEQ ID NO: 2013, the CDR3-L consists of SEQ ID NO: 3013, the CDR1-H consists of SEQ ID NO: 4013, the CDR2-H consists of SEQ ID NO: 5013 and the CDR3-H consists of SEQ ID NO: 6013; or the CDR1-L consists of SEQ ID NO: 1014, the CDR2-L consists of SEQ ID NO: 2014, the CDR3-L consists of SEQ ID NO: 3014, the CDR1-H consists of SEQ ID NO: 4014, the CDR2-H consists of SEQ ID NO: 5014 and the CDR3-H consists of SEQ ID NO: 6014; or the CDR1-L consists of SEQ ID NO: 1015, the CDR2-L consists of SEQ ID NO: 2015, the CDR3-L consists of SEQ ID NO: 3015, the CDR1-H consists of SEQ ID NO: 4015, the CDR2-H consists of SEQ ID NO: 5015 and the CDR3-H consists of SEQ ID NO: 6015; or the CDR1-L consists of SEQ ID NO: 1016, the CDR2-L consists of SEQ ID NO: 2016, the CDR3-L consists of SEQ ID NO: 3016, the CDR1-H consists of SEQ ID NO: 4016, the CDR2-H consists of SEQ ID NO: 5016 and the CDR3-H consists of SEQ ID NO: 6016; or the CDR1-L consists of SEQ ID NO: 1017, the CDR2-L consists of SEQ ID NO: 2017, the CDR3-L consists of SEQ ID NO: 3017, the CDR1-H consists of SEQ ID NO: 4017, the CDR2-H consists of SEQ ID NO: 5017 and the CDR3-H consists of SEQ ID NO: 6017; or the CDR1-L consists of SEQ ID NO: 1018, the CDR2-L consists of SEQ ID NO: 2018, the CDR3-L consists of SEQ ID NO: 3018, the CDR1-H consists of SEQ ID NO: 4018, the CDR2-H consists of SEQ ID NO: 5018 and the CDR3-H consists of SEQ ID NO: 6018; or the CDR1-L consists of SEQ ID NO: 1019, the CDR2-L consists of SEQ ID NO: 2019, the CDR3-L consists of SEQ ID NO: 3019, the CDR1-H consists of SEQ ID NO: 4019, the CDR2-H consists of SEQ ID NO: 5019 and the CDR3-H consists of SEQ ID NO: 6019; or the CDR1-L consists of SEQ ID NO: 1020, the CDR2-L consists of SEQ ID NO: 2020, the CDR3-L consists of SEQ ID NO: 3020, the CDR1-H consists of SEQ ID NO: 4020, the CDR2-H consists of SEQ ID NO: 5020 and the CDR3-H consists of SEQ ID NO: 6020; or the CDR1-L consists of SEQ ID NO: 1021, the CDR2-L consists of SEQ ID NO: 2021, the CDR3-L consists of SEQ ID NO: 3021, the CDR1-H consists of SEQ ID NO: 4021, the CDR2-H consists of SEQ ID NO: 5021 and the CDR3-H consists of SEQ ID NO: 6021; or the CDR1-L consists of SEQ ID NO: 1022, the CDR2-L consists of SEQ ID NO: 2022, the CDR3-L consists of SEQ ID NO: 3022, the CDR1-H consists of SEQ ID NO: 4022, the CDR2-H consists of SEQ ID NO: 5022 and the CDR3-H consists of SEQ ID NO: 6022; or the CDR1-L consists of SEQ ID NO: 1023, the CDR2-L consists of SEQ ID NO: 2023, the CDR3-L consists of SEQ ID NO: 3023, the CDR1-H consists of SEQ ID NO: 4023, the CDR2-H consists of SEQ ID NO: 5023 and the CDR3-H consists of SEQ ID NO: 6023; or the CDR1-L consists of SEQ ID NO: 1024, the CDR2-L consists of SEQ ID NO: 2024, the CDR3-L consists of SEQ ID NO: 3024, the CDR1-H consists of SEQ ID NO: 4024, the CDR2-H consists of SEQ ID NO: 5024 and the CDR3-H consists of SEQ ID NO: 6024; or the CDR1-L consists of SEQ ID NO: 1025, the CDR2-L consists of SEQ ID NO: 2025, the CDR3-L consists of SEQ ID NO: 3025, the CDR1-H consists of SEQ ID NO: 4025, the CDR2-H consists of SEQ ID NO: 5025 and the CDR3-H consists of SEQ ID NO: 6025; or the CDR1-L consists of SEQ ID NO: 1026, the CDR2-L consists of SEQ ID NO: 2026, the CDR3-L consists of SEQ ID NO: 3026, the CDR1-H consists of SEQ ID NO: 4026, the CDR2-H consists of SEQ ID NO: 5026 and the CDR3-H consists of SEQ ID NO: 6026; or the CDR1-L consists of SEQ ID NO: 1027, the CDR2-L consists of SEQ ID NO: 2027, the CDR3-L consists of SEQ ID NO: 3027, the CDR1-H consists of SEQ ID NO: 4027, the CDR2-H consists of SEQ ID NO: 5027 and the CDR3-H consists of SEQ ID NO: 6027; or the CDR1-L consists of SEQ ID NO: 1028, the CDR2-L consists of SEQ ID NO: 2028, the CDR3-L consists of SEQ ID NO: 3028, the CDR1-H consists of SEQ ID NO: 4028, the CDR2-H consists of SEQ ID NO: 5028 and the CDR3-H consists of SEQ ID NO: 6028.

[0020] In some embodiments, the ABP comprises a variable light chain (V_{L}) comprising a sequence at least 97% identical to a sequence selected from SEQ ID NOS: 1-28 and a variable heavy chain (V_{H}) comprising a sequence at least 97% identical to a sequence selected from SEQ ID NOS: 101-128; or a variable light chain (V_{L}) comprising a sequence at least 97% identical to a sequence selected from SEQ ID NOS: 8000-8522 and a variable heavy chain (V_{H}) comprising a sequence at least 97% identical to a sequence selected from SEQ ID NOS: 8523-9045; or a variable light chain (V_{L}) comprising a sequence at least 97% identical to a V_{L} sequence of any one of the clones in the library deposited under ATCC Accession No. PTA-125509 and a variable heavy chain (V_{H}) comprising a sequence at least 97% identical to a V_{H} sequence of any one of the clones in the library deposited under ATCC Accession No. PTA-125509. In some embodiments, the V_{L} and the V_{H} are a cognate pair.

[0021] In some embodiments, the ABP comprises a variable light chain (V_{L}) comprising a sequence selected from SEQ ID NOS: 1-28 and a variable heavy chain (V_{H}) comprising a a sequence selected from SEQ ID NOS: 101-128 or a variable light chain (V_{L}) comprising a sequence selected from SEQ ID NOS: 8000-8522 and a variable heavy chain (V_{H}) comprising a sequence selected from SEQ ID NOS: 8523-9045; or a variable light chain (V_{L}) comprising a V_{L} sequence of any one of the clones in the library deposited under ATCC Accession No. PTA-125509 and a variable heavy chain (V_{H}) comprising a V_{H} sequence of any one of the clones in the library deposited under ATCC Accession No. PTA-125509. In some embodiments, the the V_{L} and the V_{H} are a cognate pair.

[0022] In some embodiments, the ABP comprises an scFv or a full length monoclonal antibody. In some embodiments, the ABP comprises an immunoglobulin constant region.

[0023] In some embodiments, the ABP binds human PD-1 with a K_{D} of less than 500nM, as measured by bio-layer interferometry or surface plasmon resonance. In some embodiments, the ABP binds human PD-1 with a K_{D} of less than 200nM, as measured by bio-layer interferometry or surface plasmon resonance. In some embodiments, the ABP binds human PD-1 with a K_{D} of less than 25nM, as measured by bio-layer interferometry or surface plasmon resonance. In some embodiments, the ABP binds to human PD-1 on a cell surface with a K_{D} of less than 25nM.

[0024] Another aspect of the present disclosure provides a pharmaceutical composition comprising any one of the disclosed ABPs and an excipient.

[0025] Another aspect of the present disclosure provides a method of treating a disease comprising the step of: administering to a subject in need thereof an effective amount of an ABP disclosed herein or a pharmaceutical composition disclosed herein In some embodiments, the disease is selected from the group consisting of cancer, AIDS, Alzheimer's disease and viral or bacterial infection. In some embodiments, the method further comprises the step of administering one or more additional therapeutic agents to the subject. In some embodiments, the additional therapeutic agent is selected from CTLA-4 inhibitor, TIGIT inhibitor, a chemotherapy agent, an immune-stimulatory agent, radiation, a cytokine, a polynucleotide encoding a cytokine and a combination thereof.

### 6. BRIEF DESCRIPTION OF THE DRAWINGS

[0026] FIG. 1 summarized the method of generating scFv libraries from B cells isolated from fully human mice and selecting a B cell expressing an antibody having high-affinity to the antigen. FIG. 1 discloses SEQ ID NOS 12194-12221, respectively, in order of appearance.

[0027] FIG. 2 illustrates scFv amplification procedure. First, a mixture of primers directed against the IgK C region, the IgG C region, and all V regions is used to separately amplify IgK and IgH. Second, the V-H and C-K primers contain a region of complementarity that results in the formation of an overlap extension amplicon that is a fusion product between IgK and IgH. The region of complementarity comprises a DNA sequence that encodes a Gly-Ser rich scFv linker sequence. Third, semi-nested PCR is performed to add adapters for Illumina sequencing or yeast display.

[0028] FIG. 3 includes an epitope map showing the epitope binning of the indicated monoclonal antibodies and pembrolizumab.

### 7. DETAILED DESCRIPTION

### 7.1. Definitions

[0029] Unless otherwise defined herein, scientific and technical terms used in connection with the present disclosure shall have the meanings that are commonly understood by those of ordinary skill in the art. Further, unless otherwise required by context, singular terms shall include pluralities and plural terms shall include the singular. Generally, nomenclatures used in connection with, and techniques of, cell and tissue culture, molecular biology, immunology, microbiology, genetics and protein and nucleic acid chemistry and hybridization described herein are those well-known and commonly used in the art. The methods and techniques of the present disclosure are generally performed according to conventional methods well known in the art and as described in various general and more specific references that are cited and discussed throughout the present specification unless otherwise indicated. See, e.g., Sambrook et al. Molecular Cloning: A Laboratory Manual, 2d ed., Cold Spring Harbor Laboratory Press, Cold Spring Harbor, N.Y. (1989) and Ausubel et al., Current Protocols in Molecular Biology, Greene Publishing Associates (1992), and Harlow and Lane Antibodies: A Laboratory Manual Cold Spring Harbor Laboratory Press, Cold Spring Harbor, N.Y. (1990), which are incorporated herein by reference. Enzymatic reactions and purification techniques are performed according to manufacturer's specifications, as commonly accomplished in the art or as described herein. The terminology used in connection with, and the laboratory procedures and techniques of, analytical chemistry, synthetic organic chemistry, and medicinal and pharmaceutical chemistry described herein are those well-known and commonly used in the art. Standard techniques can be used for chemical syntheses, chemical analyses, pharmaceutical preparation, formulation, and delivery, and treatment of patients.

[0030] The following terms, unless otherwise indicated, shall be understood to have the following meanings:

[0031] The terms “PD-1,” “PD-1 protein,” and “PD-1 antigen” are used interchangeably herein to refer to human PD-1, or any variants (e.g., splice variants and allelic variants), isoforms, and species homologs of human PD-1 that are naturally expressed by cells, or that are expressed by cells transfected with a pdcdl gene. In some aspects, the PD-1 protein is a PD-1 protein naturally expressed by a primate (e.g., a monkey or a human), a rodent (e.g., a mouse or a rat), a dog, a camel, a cat, a cow, a goat, a horse, or a sheep. In some aspects, the PD-1 protein is human PD-1 (hPD-1; SEQ ID NO: 7001).

[0032] The term “immunoglobulin” refers to a class of structurally related proteins generally comprising two pairs of polypeptide chains: one pair of light (L) chains and one pair of heavy (H) chains. In an “intact immunoglobulin,” all four of these chains are interconnected by disulfide bonds. The structure of immunoglobulins has been well characterized. See, e.g., Paul, Fundamental Immunology 7th ed., Ch. 5 (2013) Lippincott Williams & Wilkins, Philadelphia, PA. Briefly, each heavy chain typically comprises a heavy chain variable region (V_{H}) and a heavy chain constant region (C_{H}). The heavy chain constant region typically comprises three domains, abbreviated C_{H1}, C_{H2}, and C_{H3}. Each light chain typically comprises a light chain variable region (V_{L}) and a light chain constant region. The light chain constant region typically comprises one domain, abbreviated C_{L}.

[0033] The term “antigen-binding protein” (ABP) refers to a protein comprising one or more antigen-binding domains that specifically bind to an antigen or epitope. In some embodiments, the antigen-binding domain binds the antigen or epitope with specificity and affinity similar to that of naturally occurring antibodies. In some embodiments, the ABP comprises an antibody. In some embodiments, the ABP consists of an antibody. In some embodiments, the ABP consists essentially of an antibody. In some embodiments, the ABP comprises an alternative scaffold. In some embodiments, the ABP consists of an alternative scaffold. In some embodiments, the ABP consists essentially of an alternative scaffold. In some embodiments, the ABP comprises an antibody fragment. In some embodiments, the ABP consists of an antibody fragment. In some embodiments, the ABP consists essentially of an antibody fragment. A “PD-1 ABP,” “anti-PD-1 ABP,” or “PD-1-specific ABP” is an ABP, as provided herein, which specifically binds to the antigen PD-1. In some embodiments, the ABP binds the extracellular domain of PD-1. In certain embodiments, a PD-1 ABP provided herein binds to an epitope of PD-1 that is conserved between or among PD-1 proteins from different species.

[0034] The term “antibody” is used herein in its broadest sense and includes certain types of immunoglobulin molecules comprising one or more antigen-binding domains that specifically bind to an antigen or epitope. An antibody specifically includes intact antibodies (e.g., intact immunoglobulins), antibody fragments, and multi-specific antibodies. One example of an antigen-binding domain is an antigen-binding domain formed by a V_{H}-V_{L} dimer. An antibody is one type of ABP.

[0035] The term “alternative scaffold” refers to a molecule in which one or more regions may be diversified to produce one or more antigen-binding domains that specifically bind to an antigen or epitope. In some embodiments, the antigen-binding domain binds the antigen or epitope with specificity and affinity similar to that of naturally occurring antibodies. Exemplary alternative scaffolds include those derived from fibronectin (e.g., Adnectins™), the β-sandwich (e.g., iMab), lipocalin (e.g., Anticalins®), EETI-II/AGRP, BPTI/LACI-D1/ITI-D2 (e.g., Kunitz domains), thioredoxin peptide aptamers, protein A (e.g., Affibody®), ankyrin repeats (e.g., DARPins), gamma-B-crystallin/ubiquitin (e.g., Affilins), CTLD3 (e.g., Tetranectins), Fynomers, and (LDLR-A module) (e.g., Avimers). Additional information on alternative scaffolds is provided in Binz et al., Nat. Biotechnol., 2005 23:1257-1268; Skerra, Current Opin. in Biotech., 2007 18:295-304; and Silacci et al., J. Biol. Chem., 2014, 289:14392-14398; each of which is incorporated by reference in its entirety. An alternative scaffold is one type of ABP.

[0036] The term “antigen-binding domain” means the portion of an ABP that is capable of specifically binding to an antigen or epitope.

[0037] The terms “full length antibody,” “intact antibody,” and “whole antibody” are used herein interchangeably to refer to an antibody having a structure substantially similar to a naturally occurring antibody structure and having heavy chains that comprise an Fc region.

[0038] The term “Fc region” means the C-terminal region of an immunoglobulin heavy chain that, in naturally occurring antibodies, interacts with Fc receptors and certain proteins of the complement system. The structures of the Fc regions of various immunoglobulins, and the glycosylation sites contained therein, are known in the art. See Schroeder and Cavacini, J. Allergy Clin. Immunol., 2010, 125:S41-52, incorporated by reference in its entirety. The Fc region may be a naturally occurring Fc region, or an Fc region modified as described elsewhere in this disclosure.

[0039] The V_{H} and V_{L} regions may be further subdivided into regions of hypervariability (“hypervariable regions (HVRs);” also called “complementarity determining regions” (CDRs)) interspersed with regions that are more conserved. The more conserved regions are called framework regions (FRs). Each V_{H} and V_{L} generally comprises three CDRs and four FRs, arranged in the following order (from N-terminus to C-terminus): FR1-CDR1-FR2-CDR2-FR3-CDR3-FR4. The CDRs are involved in antigen binding, and influence antigen specificity and binding affinity of the antibody. See Kabat et al., Sequences of Proteins of Immunological Interest 5th ed. (1991) Public Health Service, National Institutes of Health, Bethesda, MD, incorporated by reference in its entirety.

[0040] The light chain from any vertebrate species can be assigned to one of two types, called kappa (κ) and lambda (λ), based on the sequence of its constant domain.

[0041] The heavy chain from any vertebrate species can be assigned to one of five different classes (or isotypes): IgA, IgD, IgE, IgG, and IgM. These classes are also designated α, δ, ε, γ, and μ, respectively. The IgG and IgA classes are further divided into subclasses on the basis of differences in sequence and function. Humans express the following subclasses: IgG1, IgG2, IgG3, IgG4, IgA1, and IgA2.

[0042] The amino acid sequence boundaries of a CDR can be determined by one of skill in the art using any of a number of known numbering schemes, including those described by Kabat et al., supra (“Kabat” numbering scheme); Al-Lazikani et al., 1997, J. Mol. Biol., 273:927-948 (“Chothia” numbering scheme); MacCallum et al., 1996, 1 Mol. Biol. 262:732-745 (“Contact” numbering scheme); Lefranc et al., Dev. Comp. Immunol., 2003, 27:55-77 (“IMGT” numbering scheme); and Honegge and Plückthun, J. Mol. Biol., 2001, 309:657-70 (“AHo” numbering scheme); each of which is incorporated by reference in its entirety.

[0043] Table 1 provides the positions of CDR1-L (CDR1 of V_{L}), CDR2-L (CDR2 of V_{L}), CDR3-L (CDR3 of V_{L}), CDR1-H (CDR1 of V_{H}), CDR2-H (CDR2 of V_{H}), and CDR3-H (CDR3 of V_{H}), as identified by the Kabat and Chothia schemes. For CDR1-H, residue numbering is provided using both the Kabat and Chothia numbering schemes.

[0044] CDRs may be assigned, for example, using antibody numbering software, such as Abnum, available at www.bioinf.org.uk/abs/abnum/, and described in Abhinandan and Martin, Immunology, 2008, 45:3832-3839, incorporated by reference in its entirety.

TABLE 1
Residues in CDRs according to Kabat
and Chothia numbering schemes.

| CDR | Kabat | Chothia |
|---|---|---|
| CDR1-L | 24-34 | 24-34 |
| CDR2-L | 50-56 | 50-56 |
| CDR3-L | 89-97 | 89-97 |
| CDR1-H (Kabat Numbering) | 31-35B | 26-32 or 34* |
| CDR1-H (Chothia Numbering) | 31-35 | 26-32 |
| CDR2-H | 50-65 | 52-56 |
| CDR3-H | 95-102 | 95-102 |

*The C-terminus of CDR1-H, when numbered using the Kabat numbering convention, varies between 32 and 34, depending on the length of the CDR.

[0045] The “EU numbering scheme” is generally used when referring to a residue in an antibody heavy chain constant region (e.g., as reported in Kabat et al., supra).

[0046] An “antibody fragment” comprises a portion of an intact antibody, such as the antigen-binding or variable region of an intact antibody. Antibody fragments include, for example, Fv fragments, Fab fragments, F(ab′)2fragments, Fab' fragments, scFv (sFv) fragments, and scFv-Fc fragments.

[0047] “Fv” fragments comprise a non-covalently-linked dimer of one heavy chain variable domain and one light chain variable domain.

[0048] “Fab” fragments comprise, in addition to the heavy and light chain variable domains, the constant domain of the light chain and the first constant domain (CHO of the heavy chain. Fab fragments may be generated, for example, by recombinant methods or by papain digestion of a full-length antibody.

[0049] “F(ab′)₂” fragments contain two Fab′ fragments joined, near the hinge region, by disulfide bonds. F(ab′)₂ fragments may be generated, for example, by recombinant methods or by pepsin digestion of an intact antibody. The F(ab′) fragments can be dissociated, for example, by treatment with B-mercaptoethanol.

[0050] “Single-chain Fv” or “sFv” or “scFv” antibody fragments comprise a V_{H} domain and a V_{L} domain in a single polypeptide chain. The V_{H} and V_{L} are generally linked by a peptide linker. See Plückthun A. (1994). In some embodiments, the linker is a (GGGGS)ₙ (SEQ ID NO: 12190). In some embodiments, n=1, 2, 3, 4, 5, or 6. See Antibodies from Escherichia coli. In Rosenberg M. & Moore G. P. (Eds.), The Pharmacology of Monoclonal Antibodies vol. 113 (pp. 269-315). Springer-Verlag, New York, incorporated by reference in its entirety.

[0051] “scFv-Fc” fragments comprise an scFv attached to an Fc domain. For example, an Fc domain may be attached to the C-terminal of the scFv. The Fc domain may follow the V_{H} or V_{L}, depending on the orientation of the variable domains in the scFv (i.e., V_{H}-V_{L} or V_{L}-V_{H}). Any suitable Fc domain known in the art or described herein may be used. In some cases, the Fc domain comprises an IgG4 Fc domain.

[0052] The term “single domain antibody” refers to a molecule in which one variable domain of an antibody specifically binds to an antigen without the presence of the other variable domain. Single domain antibodies, and fragments thereof, are described in Arabi Ghahroudi et al., FEBS Letters, 1998, 414:521-526 and Muyldermans et al., Trends in Biochem. Sci., 2001, 26:230-245, each of which is incorporated by reference in its entirety.

[0053] A “monospecific ABP” is an ABP that comprises a binding site that specifically binds to a single epitope. An example of a monospecific ABP is a naturally occurring IgG molecule which, while divalent, recognizes the same epitope at each antigen-binding domain. The binding specificity may be present in any suitable valency.

[0054] The term “monoclonal antibody” refers to an antibody from a population of substantially homogeneous antibodies. A population of substantially homogeneous antibodies comprises antibodies that are substantially similar and that bind the same epitope(s), except for variants that may normally arise during production of the monoclonal antibody. Such variants are generally present in only minor amounts. A monoclonal antibody is typically obtained by a process that includes the selection of a single antibody from a plurality of antibodies. For example, the selection process can be the selection of a unique clone from a plurality of clones, such as a pool of hybridoma clones, phage clones, yeast clones, bacterial clones, or other recombinant DNA clones. The selected antibody can be further altered, for example, to improve affinity for the target (“affinity maturation”), to humanize the antibody, to improve its production in cell culture, and/or to reduce its immunogenicity in a subject.

[0055] The term “chimeric antibody” refers to an antibody in which a portion of the heavy and/or light chain is derived from a particular source or species, while the remainder of the heavy and/or light chain is derived from a different source or species.

[0056] “Humanized” forms of non-human antibodies are chimeric antibodies that contain minimal sequence derived from the non-human antibody. A humanized antibody is generally a human antibody (recipient antibody) in which residues from one or more CDRs are replaced by residues from one or more CDRs of a non-human antibody (donor antibody). The donor antibody can be any suitable non-human antibody, such as a mouse, rat, rabbit, chicken, or non-human primate antibody having a desired specificity, affinity, or biological effect. In some instances, selected framework region residues of the recipient antibody are replaced by the corresponding framework region residues from the donor antibody. Humanized antibodies may also comprise residues that are not found in either the recipient antibody or the donor antibody. Such modifications may be made to further refine antibody function. For further details, see Jones et al., Nature, 1986, 321:522-525; Riechmann et al., Nature, 1988, 332:323-329; and Presta, Curr. Op. Struct. Biol., 1992, 2:593-596, each of which is incorporated by reference in its entirety.

[0057] A “human antibody” is one which possesses an amino acid sequence corresponding to that of an antibody produced by a human or a human cell, or derived from a non-human source that utilizes a human antibody repertoire or human antibody-encoding sequences (e.g., obtained from human sources or designed de novo). Human antibodies specifically exclude humanized antibodies. In some embodiments, rodents are genetically engineered to replace their rodent antibody sequences with human antibodies.

[0058] An “isolated ABP” or “isolated nucleic acid” is an ABP or nucleic acid that has been separated and/or recovered from a component of its natural environment. Components of the natural environment may include enzymes, hormones, and other proteinaceous or nonproteinaceous materials. In some embodiments, an isolated ABP is purified to a degree sufficient to obtain at least 15 residues of N-terminal or internal amino acid sequence, for example by use of a spinning cup sequenator. In some embodiments, an isolated ABP is purified to homogeneity by gel electrophoresis (e.g., SDS-PAGE) under reducing or nonreducing conditions, with detection by Coomassie blue or silver stain. An isolated ABP includes an ABP in situ within recombinant cells, since at least one component of the ABP's natural environment is not present. In some aspects, an isolated ABP or isolated nucleic acid is prepared by at least one purification step. In some embodiments, an isolated ABP or isolated nucleic acid is purified to at least 80%, 85%, 90%, 95%, or 99% by weight. In some embodiments, an isolated ABP or isolated nucleic acid is purified to at least 80%, 85%, 90%, 95%, or 99% by volume. In some embodiments, an isolated ABP or isolated nucleic acid is provided as a solution comprising at least 85%, 90%, 95%, 98%, 99% to 100% ABP or nucleic acid by weight. In some embodiments, an isolated ABP or isolated nucleic acid is provided as a solution comprising at least 85%, 90%, 95%, 98%, 99% to 100% ABP or nucleic acid by volume.

[0059] “Affinity” refers to the strength of the sum total of non-covalent interactions between a single binding site of a molecule (e.g., an ABP) and its binding partner (e.g., an antigen or epitope). Unless indicated otherwise, as used herein, “affinity” refers to intrinsic binding affinity, which reflects a 1:1 interaction between members of a binding pair (e.g., ABP and antigen or epitope). The affinity of a molecule X for its partner Y can be represented by the dissociation equilibrium constant (K_{D} ). The kinetic components that contribute to the dissociation equilibrium constant are described in more detail below. Affinity can be measured by common methods known in the art, including those described herein. Affinity can be determined, for example, using surface plasmon resonance (SPR) technology (e.g., BIACORE®) or biolayer interferometry (e.g., FORTEBIO®).

[0060] With regard to the binding of an ABP to a target molecule, the terms “bind,” “specific binding,” “specifically binds to,” “specific for,” “selectively binds,” and “selective for” a particular antigen (e.g., a polypeptide target) or an epitope on a particular antigen mean binding that is measurably different from a non-specific or non-selective interaction (e.g., with a non-target molecule). Specific binding can be measured, for example, by measuring binding to a target molecule and comparing it to binding to a non-target molecule. Specific binding can also be determined by competition with a control molecule that mimics the epitope recognized on the target molecule. In that case, specific binding is indicated if the binding of the ABP to the target molecule is competitively inhibited by the control molecule. In some aspects, the affinity of a PD-1 ABP for a non-target molecule is less than about 50% of the affinity for PD-1. In some aspects, the affinity of a PD-1 ABP for a non-target molecule is less than about 40% of the affinity for PD-1. In some aspects, the affinity of a PD-1 ABP for a non-target molecule is less than about 30% of the affinity for PD-1. In some aspects, the affinity of a PD-1 ABP for a non-target molecule is less than about 20% of the affinity for PD-1. In some aspects, the affinity of a PD-1 ABP for a non-target molecule is less than about 10% of the affinity for PD-1. In some aspects, the affinity of a PD-1 ABP for a non-target molecule is less than about 1% of the affinity for PD-1. In some aspects, the affinity of a PD-1 ABP for a non-target molecule is less than about 0.1% of the affinity for PD-1.

[0061] The term “k_{d}” (sec⁻¹), as used herein, refers to the dissociation rate constant of a particular ABP -antigen interaction. This value is also referred to as the koff value.

[0062] The term “kₐ” (M⁻¹×sec⁻¹), as used herein, refers to the association rate constant of a particular ABP -antigen interaction. This value is also referred to as the kₒₙ value.

[0063] The term “K_{D}” (M), as used herein, refers to the dissociation equilibrium constant of a particular ABP -antigen interaction. K_{D}=k_{d}/kₐ.

[0064] The term “K_{A}” (M⁻¹), as used herein, refers to the association equilibrium constant of a particular ABP -antigen interaction. K_{A}=kₐ/k_{d}.

[0065] An “affinity matured” ABP is one with one or more alterations (e.g., in one or more CDRs or FRs) that result in an improvement in the affinity of the ABP for its antigen, compared to a parent ABP which does not possess the alteration(s). In one embodiment, an affinity matured ABP has nanomolar or picomolar affinity for the target antigen. Affinity matured ABPs may be produced using a variety of methods known in the art. For example, Marks et al. (Bio/Technology, 1992, 10:779-783, incorporated by reference in its entirety) describes affinity maturation by V_{H} and V_{L} domain shuffling. Random mutagenesis of CDR and/or framework residues is described by, for example, Barbas et al. (Proc. Nat. Acad. Sci. U.S.A., 1994, 91:3809-3813); Schier et al., Gene, 1995, 169:147-155; Yelton et al., J. Immunol., 1995, 155:1994-2004; Jackson et al., J. Immunol., 1995, 154:3310-33199; and Hawkins et al, J. Mol. Biol., 1992, 226:889-896; each of which is incorporated by reference in its entirety.

[0066] An “immunoconjugate” is an ABP conjugated to one or more heterologous molecule(s).

[0067] “Effector functions” refer to those biological activities mediated by the Fc region of an antibody, which activities may vary depending on the antibody isotype. Examples of antibody effector functions include Clq binding to activate complement dependent cytotoxicity (CDC), Fc receptor binding to activate antibody-dependent cellular cytotoxicity (ADCC), and antibody dependent cellular phagocytosis (ADCP).

[0068] When used herein in the context of two or more ABPs, the term “competes with” or “cross-competes with” indicates that the two or more ABPs compete for binding to an antigen (e.g., PD-1). In one exemplary assay, PD-1 is coated on a surface and contacted with a first PD-1 ABP, after which a second PD-1 ABP is added. In another exemplary assay, a first PD-1 ABP is coated on a surface and contacted with PD-1, and then a second PD-1 ABP is added. If the presence of the first PD-1 ABP reduces binding of the second PD-1 ABP, in either assay, then the ABPs compete. The term “competes with” also includes combinations of ABPs where one ABP reduces binding of another ABP, but where no competition is observed when the ABPs are added in the reverse order. However, in some embodiments, the first and second ABPs inhibit binding of each other, regardless of the order in which they are added. In some embodiments, one ABP reduces binding of another ABP to its antigen by at least 25%, at least 50%, at least 60%, at least 70%, at least 80%, at least 85%, at least 90%, or at least 95%. A skilled artisan can select the concentrations of the antibodies used in the competition assays based on the affinities of the ABPs for PD-1 and the valency of the ABPs. The assays described in this definition are illustrative, and a skilled artisan can utilize any suitable assay to determine if antibodies compete with each other. Suitable assays are described, for example, in Cox et al., “Immunoassay Methods,” in Assay Guidance Manual [Internet], Updated Dec. 24, 2014 (www.ncbi.nlm.nih.gov/books/NBK92434/; accessed Sep. 29, 2015); Silman et al., Cytometry, 2001, 44:30-37; and Finco et al., J. Pharm. Biomed. Anal., 2011, 54:351-358; each of which is incorporated by reference in its entirety.

[0069] The term “epitope” means a portion of an antigen the specifically binds to an ABP. Epitopes frequently consist of surface-accessible amino acid residues and/or sugar side chains and may have specific three dimensional structural characteristics, as well as specific charge characteristics. Conformational and non-conformational epitopes are distinguished in that the binding to the former but not the latter may be lost in the presence of denaturing solvents. An epitope may comprise amino acid residues that are directly involved in the binding, and other amino acid residues, which are not directly involved in the binding. The epitope to which an ABP binds can be determined using known techniques for epitope determination such as, for example, testing for ABP binding to PD-1 variants with different point-mutations, or to chimeric PD-1 variants.

[0070] Percent “identity” between a polypeptide sequence and a reference sequence, is defined as the percentage of amino acid residues in the polypeptide sequence that are identical to the amino acid residues in the reference sequence, after aligning the sequences and introducing gaps, if necessary, to achieve the maximum percent sequence identity. Alignment for purposes of determining percent amino acid sequence identity can be achieved in various ways that are within the skill in the art, for instance, using publicly available computer software such as BLAST, BLAST-2, ALIGN, MEGALIGN (DNASTAR), CLUSTALW, CLUSTAL OMEGA, or MUSCLE software. Those skilled in the art can determine appropriate parameters for aligning sequences, including any algorithms needed to achieve maximal alignment over the full length of the sequences being compared.

[0071] A “conservative substitution” or a “conservative amino acid substitution,” refers to the substitution an amino acid with a chemically or functionally similar amino acid. Conservative substitution tables providing similar amino acids are well known in the art. By way of example, the groups of amino acids provided in TABLES 2-4 are, in some embodiments, considered conservative substitutions for one another.

TABLE 2
Selected groups of amino acids that are considered conservative
substitutions for one another, in certain embodiments.

| | |
|---|---|
| Acidic Residues | P and E |
| Basic Residues | K, R, and H |
| Hydrophilic Uncharged Residues | S, T, N, and Q |
| Aliphatic Uncharged Residues | G, A, V, L, and I |
| Non-polar Uncharged Residues | C, M, and P |
| Aromatic Residues | F, Y, and W |

TABLE 3
Additional selected groups of amino acids that
are considered conservative substitutions
for one another, in certain embodiments.

| | |
|---|---|
| Group 1 | A, S, and T |
| Group 2 | D and E |
| Group 3 | N and Q |
| Group 4 | R and K |
| Group 5 | I, L, and M |
| Group 6 | F, Y, and W |

TABLE 4
Further selected groups of amino acids that are considered conservative
substitutions for one another, in certain embodiments.

| | |
|---|---|
| Group A | A and G |
| Group B | D and E |
| Group C | N and Q |
| Group D | R, K, and H |
| Group E | I, L, M, V |
| Group F | F, Y, and W |
| Group G | S and T |
| Group H | C and M |

[0072] Additional conservative substitutions may be found, for example, in Creighton, Proteins: Structures and Molecular Properties 2nd ed. (1993) W. H. Freeman & Co., New York, N.Y. An ABP generated by making one or more conservative substitutions of amino acid residues in a parent ABP is referred to as a “conservatively modified variant.”

[0073] The term “treating” (and variations thereof such as “treat” or “treatment”) refers to clinical intervention in an attempt to alter the natural course of a disease or condition in a subject in need thereof. Treatment can be performed both for prophylaxis and during the course of clinical pathology. Desirable effects of treatment include preventing occurrence or recurrence of disease, alleviation of symptoms, diminish of any direct or indirect pathological consequences of the disease, preventing metastasis, decreasing the rate of disease progression, amelioration or palliation of the disease state, and remission or improved prognosis.

[0074] As used herein, the term “therapeutically effective amount” or “effective amount” refers to an amount of an ABP or pharmaceutical composition provided herein that, when administered to a subject, is effective to treat a disease or disorder.

[0075] As used herein, the term “subject” means a mammalian subject. Exemplary subjects include humans, monkeys, dogs, cats, mice, rats, cows, horses, camels, goats, rabbits, and sheep. In certain embodiments, the subject is a human. In some embodiments the subject has a disease or condition that can be treated with an ABP provided herein. In some aspects, the disease or condition is a cancer. In some aspects, the disease or condition is a viral infection.

[0076] The term “package insert” is used to refer to instructions customarily included in commercial packages of therapeutic or diagnostic products (e.g., kits) that contain information about the indications, usage, dosage, administration, combination therapy, contraindications and/or warnings concerning the use of such therapeutic or diagnostic products.

[0077] The term “cytotoxic agent,” as used herein, refers to a substance that inhibits or prevents a cellular function and/or causes cell death or destruction.

[0078] A “chemotherapeutic agent” refers to a chemical compound useful in the treatment of cancer. Chemotherapeutic agents include “anti-hormonal agents” or “endocrine therapeutics” which act to regulate, reduce, block, or inhibit the effects of hormones that can promote the growth of cancer.

[0079] The term “cytostatic agent” refers to a compound or composition which arrests growth of a cell either in vitro or in vivo. In some embodiments, a cytostatic agent is an agent that reduces the percentage of cells in S phase. In some embodiments, a cytostatic agent reduces the percentage of cells in S phase by at least about 20%, at least about 40%, at least about 60%, or at least about 80%.

[0080] The term “tumor” refers to all neoplastic cell growth and proliferation, whether malignant or benign, and all pre-cancerous and cancerous cells and tissues. The terms “cancer,” “cancerous,” “cell proliferative disorder,” “proliferative disorder” and “tumor” are not mutually exclusive as referred to herein. The terms “cell proliferative disorder” and “proliferative disorder” refer to disorders that are associated with some degree of abnormal cell proliferation. In some embodiments, the cell proliferative disorder is a cancer.

[0081] The term “pharmaceutical composition” refers to a preparation which is in such form as to permit the biological activity of an active ingredient contained therein to be effective in treating a subject, and which contains no additional components which are unacceptably toxic to the subject.

[0082] The terms “modulate” and “modulation” refer to reducing or inhibiting or, alternatively, activating or increasing, a recited variable.

[0083] The terms “increase” and “activate” refer to an increase of 10%, 20%, 30%, 40%, 50%, 60%, 70%, 75%, 80%, 85%, 90%, 95%, 100%, 2-fold, 3-fold, 4-fold, 5-fold, 10-fold, 20-fold, 50-fold, 100-fold, or greater in a recited variable.

[0084] The terms “reduce” and “inhibit” refer to a decrease of 10%, 20%, 30%, 40%, 50%, 60%, 70%, 75%, 80%, 85%, 90%, 95%, 2-fold, 3-fold, 4-fold, 5-fold, 10-fold, 20-fold, 50-fold, 100-fold, or greater in a recited variable.

[0085] The term “agonize” refers to the activation of receptor signaling to induce a biological response associated with activation of the receptor. An “agonist” is an entity that binds to and agonizes a receptor.

[0086] The term “antagonize” refers to the inhibition of receptor signaling to inhibit a biological response associated with activation of the receptor. An “antagonist” is an entity that binds to and antagonizes a receptor.

[0087] The term “effector T cell” includes T helper (i.e., CD4+) cells and cytotoxic (i.e., CD8+) T cells. CD4+effector T cells contribute to the development of several immunologic processes, including maturation of B cells into plasma cells and memory B cells, and activation of cytotoxic T cells and macrophages. CD8+ effector T cells destroy virus-infected cells and tumor cells. See Seder and Ahmed, Nature Immunol., 2003, 4:835-842, incorporated by reference in its entirety, for additional information on effector T cells.

[0088] The term “regulatory T cell” includes cells that regulate immunological tolerance, for example, by suppressing effector T cells. In some aspects, the regulatory T cell has a CD4+CD25+Foxp3+ phenotype. In some aspects, the regulatory T cell has a CD8+CD25+ phenotype. See Nocentini et al., Br. J. Pharmacol., 2012, 165:2089-2099, incorporated by reference in its entirety, for additional information on regulatory T cells.

[0089] The term “dendritic cell” refers to a professional antigen-presenting cell capable of activating a naive T cell and stimulating growth and differentiation of a B cell.

[0090] A “variant” of a polypeptide (e.g., an antibody) comprises an amino acid sequence wherein one or more amino acid residues are inserted into, deleted from and/or substituted into the amino acid sequence relative to the native polypeptide sequence, and retains essentially the same biological activity as the native polypeptide. The biological activity of the polypeptide can be measured using standard techniques in the art (for example, if the variant is an antibody, its activity may be tested by binding assays, as described herein). Variants of the present disclosure include fragments, analogs, recombinant polypeptides, synthetic polypeptides, and/or fusion proteins.

[0091] A “derivative” of a polypeptide is a polypeptide (e.g., an antibody) that has been chemically modified, e.g., via conjugation to another chemical moiety such as, for example, polyethylene glycol, albumin (e.g., human serum albumin), phosphorylation, and glycosylation. Unless otherwise indicated, the term “antibody” includes, in addition to antibodies comprising two full-length heavy chains and two full-length light chains, derivatives, variants, fragments, and muteins thereof, examples of which are described below.

[0092] A nucleotide sequence is “operably linked” to a regulatory sequence if the regulatory sequence affects the expression (e.g., the level, timing, or location of expression) of the nucleotide sequence. A “regulatory sequence” is a nucleic acid that affects the expression (e.g., the level, timing, or location of expression) of a nucleic acid to which it is operably linked. The regulatory sequence can, for example, exert its effects directly on the regulated nucleic acid, or through the action of one or more other molecules (e.g., polypeptides that bind to the regulatory sequence and/or the nucleic acid). Examples of regulatory sequences include promoters, enhancers and other expression control elements (e.g., polyadenylation signals). Further examples of regulatory sequences are described in, for example, Goeddel, 1990, Gene Expression Technology: Methods in Enzymology 185, Academic Press, San Diego, Calif. and Baron et al., 1995, Nucleic Acids Res. 23:3605-06. [0078]

[0093] A “host cell” is a cell that can be used to express a nucleic acid, e.g., a nucleic acid of the present disclosure. A host cell can be a prokaryote, for example, E. coli, or it can be a eukaryote, for example, a single-celled eukaryote (e.g., a yeast or other fungus), a plant cell (e.g., a tobacco or tomato plant cell), an animal cell (e.g., a human cell, a monkey cell, a hamster cell, a rat cell, a mouse cell, or an insect cell) or a hybridoma. Examples of host cells include CS-9 cells, the COS-7 line of monkey kidney cells (ATCC CRL 1651) (see Gluzman et al., 1981, Cell 23:175), L cells, C127 cells, 3T3 cells (ATCC CCL 163), Chinese hamster ovary (CHO) cells or their derivatives such as Veggie CHO and related cell lines which grow in serum-free media (see Rasmussen et al., 1998, Cytotechnology 28:31), HeLa cells, BHK (ATCC CRL 10) cell lines, the CV1/EBNA cell line derived from the African green monkey kidney cell line CV1 (ATCC CCL 70) (see McMahan et al., 1991, EMBO J. 10:2821), human embryonic kidney cells such as 293, 293 EBNA or MSR 293, human epidermal A431 cells, human Colo205 cells, other transformed primate cell lines, normal diploid cells, cell strains derived from in vitro culture of primary tissue, primary explants, HL-60, U937, HaK or Jurkat cells. Typically, a host cell is a cultured cell that can be transformed or transfected with a polypeptide-encoding nucleic acid, which can then be expressed in the host cell.

[0094] The phrase “recombinant host cell” can be used to denote a host cell that has been transformed or transfected with a nucleic acid to be expressed. A host cell also can be a cell that comprises the nucleic acid but does not express it at a desired level unless a regulatory sequence is introduced into the host cell such that it becomes operably linked with the nucleic acid. It is understood that the term host cell refers not only to the particular subject cell but to the progeny or potential progeny of such a cell. Because certain modifications may occur in succeeding generations due to, e.g., mutation or environmental influence, such progeny may not, in fact, be identical to the parent cell, but are still included within the scope of the term as used herein.

### 7.2. Other Interpretational Conventions

[0095] Ranges recited herein are understood to be shorthand for all of the values within the range, inclusive of the recited endpoints. For example, a range of 1 to 50 is understood to include any number, combination of numbers, or sub-range from the group consisting of 1, 2, 3, 4, 5, 6, 7, 8, 9, 10, 11, 12, 13, 14, 15, 16, 17, 18, 19, 20, 21, 22, 23, 24, 25, 26, 27, 28, 29, 30, 31, 32, 33, 34, 35, 36, 37, 38, 39, 40, 41, 42, 43, 44, 45, 46, 47, 48, 49, and 50.

[0096] Unless otherwise indicated, reference to a compound that has one or more stereocenters intends each stereoisomer, and all combinations of stereoisomers, thereof.

### 7.3. Nucleic Acids

[0097] In one aspect, the present disclosure provides isolated nucleic acid molecules. The nucleic acids comprise, for example, polynucleotides that encode all or part of an antigen binding protein, for example, one or both chains of an antibody of the present disclosure, or a fragment, derivative, mutein, or variant thereof, polynucleotides sufficient for use as hybridization probes, PCR primers or sequencing primers for identifying, analyzing, mutating or amplifying a polynucleotide encoding a polypeptide, anti-sense nucleic acids for inhibiting expression of a polynucleotide, and complementary sequences of the foregoing. The nucleic acids can be any length. They can be, for example, 5, 10, 15, 20, 25, 30, 35, 40, 45, 50, 75, 100, 125, 150, 175, 200, 250, 300, 350, 400, 450, 500, 750, 1,000, 1,500, 3,000, 5,000 or more nucleotides in length, and/or can comprise one or more additional sequences, for example, regulatory sequences, and/or be part of a larger nucleic acid, for example, a vector. The nucleic acids can be single-stranded or double-stranded and can comprise RNA and/or DNA nucleotides, and artificial variants thereof (e.g., peptide nucleic acids).

[0098] Nucleic acids encoding antibody polypeptides (e.g., heavy or light chain, variable domain only, or full length) can be isolated from B-cells of mice that have been immunized with PD-1. The nucleic acid can be isolated by conventional procedures such as polymerase chain reaction (PCR).

[0099] Nucleic acid sequences encoding the variable regions of the heavy and light chain variable regions are shown herein. The skilled artisan will appreciate that, due to the degeneracy of the genetic code, each of the polypeptide sequences disclosed herein is encoded by a large number of other nucleic acid sequences. The present disclosure provides each degenerate nucleotide sequence encoding each antigen binding protein of the present disclosure.

[0100] The present disclosure further provides nucleic acids that hybridize to other nucleic acids (e.g., nucleic acids comprising a nucleotide sequence of any of PDCD1 gene) under particular hybridization conditions. Methods for hybridizing nucleic acids are well-known in the art. See, e.g., Curr. Prot. in Mol. Biol., John Wiley & Sons, N.Y. (1989), 6.3.1-6.3.6. As defined herein, a moderately stringent hybridization condition uses a prewashing solution containing 5× sodium chloride/sodium citrate (SSC), 0.5% SDS, 1.0 mM EDTA (pH 8.0), hybridization buffer of about 50% formamide, 6× SSC, and a hybridization temperature of 55° C. (or other similar hybridization solutions, such as one containing about 50% formamide, with a hybridization temperature of 42° C.), and washing conditions of 60° C., in 0.5× SSC, 0.1% SDS. A stringent hybridization condition hybridizes in 6X SSC at 45° C., followed by one or more washes in 0.1× SSC, 0.2% SDS at 68° C. Furthermore, one of skill in the art can manipulate the hybridization and/or washing conditions to increase or decrease the stringency of hybridization such that nucleic acids comprising nucleotide sequences that are at least 65, 70, 75, 80, 85, 90, 95, 96, 97, 98, or 99% identical to each other typically remain hybridized to each other. The basic parameters affecting the choice of hybridization conditions and guidance for devising suitable conditions are set forth by, for example, Sambrook, Fritsch, and Maniatis (1989, Molecular Cloning: A Laboratory Manual, Cold Spring Harbor Laboratory Press, Cold Spring Harbor, N.Y., chapters 9 and 11; and Curr. Prot. in Mol. Biol. 1995, Ausubel et al., eds., John Wiley & Sons, Inc., sections 2.10 and 6.3-6.4), and can be readily determined by those having ordinary skill in the art based on, for example, the length and/or base composition of the DNA.

[0101] Changes can be introduced by mutation into a nucleic acid, thereby leading to changes in the amino acid sequence of a polypeptide (e.g., an antigen binding protein) that it encodes. Mutations can be introduced using any technique known in the art. In one embodiment, one or more particular amino acid residues are changed using, for example, a site-directed mutagenesis protocol. In another embodiment, one or more randomly selected residues are changed using, for example, a random mutagenesis protocol. However it is made, a mutant polypeptide can be expressed and screened for a desired property (e.g., binding to PD-1).

[0102] Mutations can be introduced into a nucleic acid without significantly altering the biological activity of a polypeptide that it encodes. For example, one can make nucleotide substitutions leading to amino acid substitutions at non-essential amino acid residues. In one embodiment, a nucleotide sequence provided herein for PD-1, or a desired fragment, variant, or derivative thereof, is mutated such that it encodes an amino acid sequence comprising one or more deletions or substitutions of amino acid residues that are shown herein for PD-1 to be residues where two or more sequences differ. Alternatively, one or more mutations can be introduced into a nucleic acid that selectively change the biological activity (e.g., binding of PD-1) of a polypeptide that it encodes. For example, the mutation can quantitatively or qualitatively change the biological activity. Examples of quantitative changes include increasing, reducing or eliminating the activity. Examples of qualitative changes include changing the antigen specificity of an antigen binding protein.

[0103] In another aspect, the present disclosure provides nucleic acid molecules that are suitable for use as primers or hybridization probes for the detection of nucleic acid sequences of the present disclosure. A nucleic acid molecule of the present disclosure can comprise only a portion of a nucleic acid sequence encoding a full-length polypeptide of the present disclosure, for example, a fragment that can be used as a probe or primer or a fragment encoding an active portion (e.g., a PD-1 binding portion) of a polypeptide of the present disclosure.

[0104] Probes based on the sequence of a nucleic acid of the present disclosure can be used to detect the nucleic acid or similar nucleic acids, for example, transcripts encoding a polypeptide of the present disclosure. The probe can comprise a label group, e.g., a radioisotope, a fluorescent compound, an enzyme, or an enzyme co-factor. Such probes can be used to identify a cell that expresses the polypeptide

### 7.4. Expression Vectors

[0105] The present disclosure provides vectors comprising a nucleic acid encoding a polypeptide of the present disclosure or a portion thereof. Examples of vectors include, but are not limited to, plasmids, viral vectors, non-episomal mammalian vectors and expression vectors, for example, recombinant expression vectors.

[0106] In another aspect of the present disclosure, expression vectors containing the nucleic acid molecules and polynucleotides of the present disclosure are also provided, and host cells transformed with such vectors, and methods of producing the polypeptides are also provided. The term “expression vector” refers to a plasmid, phage, virus or vector for expressing a polypeptide from a polynucleotide sequence. Vectors for the expression of the polypeptides contain at a minimum sequences required for vector propagation and for expression of the cloned insert. An expression vector comprises a transcriptional unit comprising an assembly of (1) a genetic element or elements having a regulatory role in gene expression, for example, promoters or enhancers, (2) a sequence that encodes polypeptides and proteins to be transcribed into mRNA and translated into protein, and (3) appropriate transcription initiation and termination sequences. These sequences may further include a selection marker. Vectors suitable for expression in host cells are readily available and the nucleic acid molecules are inserted into the vectors using standard recombinant DNA techniques. Such vectors can include promoters which function in specific tissues, and viral vectors for the expression of polypeptides in targeted human or animal cells.

[0107] The recombinant expression vectors of the present disclosure can comprise a nucleic acid of the present disclosure in a form suitable for expression of the nucleic acid in a host cell. The recombinant expression vectors include one or more regulatory sequences, selected on the basis of the host cells to be used for expression, which is operably linked to the nucleic acid sequence to be expressed. Regulatory sequences include those that direct constitutive expression of a nucleotide sequence in many types of host cells (e.g., SV40 early gene enhancer, Rous sarcoma virus promoter and cytomegalovirus promoter), those that direct expression of the nucleotide sequence only in certain host cells (e.g., tissue-specific regulatory sequences, see Voss et al., 1986, Trends Biochem. Sci. 11:287, Maniatis et al., 1987, Science 236:1237, incorporated by reference herein in their entireties), and those that direct inducible expression of a nucleotide sequence in response to particular treatment or condition (e.g., the metallothionin promoter in mammalian cells and the tet-responsive and/or streptomycin responsive promoter in both prokaryotic and eukaryotic systems (see id.). It will be appreciated by those skilled in the art that the design of the expression vector can depend on such factors as the choice of the host cell to be transformed, the level of expression of protein desired, etc. The expression vectors of the present disclosure can be introduced into host cells to thereby produce proteins or peptides, including fusion proteins or peptides, encoded by nucleic acids as described herein.

[0108] In some embodiments, the expression vector is an expression vector purified from one of the clones of the library of PD-1 binding clones deposited under ATCC Accession No. PTA-125509. In some embodiments, the expression vector is generated by genetic modification of one of an expression vector in one of the clones purified from the library of PD-1 binding clones deposited under ATCC Accession No. PTA-125509. In some embodiments, the expression vector is generated by using variable region sequences of heavy and light chains of one of the clones of the library of PD-1 binding clones deposited under ATCC Accession No. PTA-125509.

[0109] The present disclosure further provides methods of making polypeptides. A variety of other expression/host systems may be utilized. Vector DNA can be introduced into prokaryotic or eukaryotic systems via conventional transformation or transfection techniques. These systems include but are not limited to microorganisms such as bacteria (for example, E. coli) transformed with recombinant bacteriophage, plasmid or cosmid DNA expression vectors; yeast transformed with yeast expression vectors; insect cell systems infected with virus expression vectors (e.g., baculovirus); plant cell systems transfected with virus expression vectors (e.g., cauliflower mosaic virus, CaMV; tobacco mosaic virus, TMV) or transformed with bacterial expression vectors (e.g., Ti or pBR322 plasmid); or animal cell systems. Mammalian cells useful in recombinant protein production include but are not limited to VERO cells, HeLa cells, Chinese hamster ovary (CHO) cell lines, or their derivatives such as Veggie CHO and related cell lines which grow in serum-free media (see Rasmussen et al., 1998, Cytotechnology 28:31) or CHO strain DX-B11, which is deficient in DHFR (see Urlaub et al., 1980, Proc. Natl. Acad. Sci. USA 77:4216-20) COS cells such as the COS-7 line of monkey kidney cells (ATCC CRL 1651) (see Gluzman et al., 1981, Cell 23:175), W138, BHK, HepG2, 3T3 (ATCC CCL 163), RIN, MDCK, A549, PC12, K562, L cells, C127 cells, BHK (ATCC CRL 10) cell lines, the CV1/EBNA cell line derived from the African green monkey kidney cell line CV1 (ATCC CCL 70) (see McMahan et al., 1991, EMBO J. 10:2821), human embryonic kidney cells such as 293, 293 EBNA or MSR 293, human epidermal A431 cells, human Colo205 cells, other transformed primate cell lines, normal diploid cells, cell strains derived from in vitro culture of primary tissue, primary explants, HL-60, U937, HaK or Jurkat cells. Mammalian expression allows for the production of secreted or soluble polypeptides which may be recovered from the growth medium.

[0110] For stable transfection of mammalian cells, it is known that, depending upon the expression vector and transfection technique used, only a small fraction of cells may integrate the foreign DNA into their genome. In order to identify and select these integrants, a gene that encodes a selectable marker (e.g., for resistance to antibiotics) is generally introduced into the host cells along with the gene of interest. Once such cells are transformed with vectors that contain selectable markers as well as the desired expression cassette, the cells can be allowed to grow in an enriched media before they are switched to selective media, for example. The selectable marker is designed to allow growth and recovery of cells that successfully express the introduced sequences. Resistant clumps of stably transformed cells can be proliferated using tissue culture techniques appropriate to the cell line employed. An overview of expression of recombinant proteins is found in Methods of Enzymology, v. 185, Goeddell, D. V., ed., Academic Press (1990). Preferred selectable markers include those which confer resistance to drugs, such as G418, hygromycin and methotrexate. Cells stably transfected with the introduced nucleic acid can be identified by drug selection (e.g., cells that have incorporated the selectable marker gene will survive, while the other cells die), among other methods.

[0111] The transformed cells can be cultured under conditions that promote expression of the polypeptide, and the polypeptide recovered by conventional protein purification procedures (as defined above). One such purification procedure includes the use of affinity chromatography, e.g., over a matrix having all or a portion (e.g., the extracellular domain) of PD-1 bound thereto. Polypeptides contemplated for use herein include substantially homogeneous recombinant mammalian anti-PD-1 antibody polypeptides substantially free of contaminating endogenous materials.

[0112] In some cases, such as in expression using prokaryotic systems, the expressed polypeptides of this disclosure may need to be “refolded” and oxidized into a proper tertiary structure and disulfide linkages generated in order to be biologically active. Refolding can be accomplished using a number of procedures well known in the art. Such methods include, for example, exposing the solubilized polypeptide to a pH usually above 7 in the presence of a chaotropic agent. The selection of chaotrope is similar to the choices used for inclusion body solubilization; however a chaotrope is typically used at a lower concentration. Exemplary chaotropic agents are guanidine and urea. In most cases, the refolding/oxidation solution will also contain a reducing agent plus its oxidized form in a specific ratio to generate a particular redox potential which allows for disulfide shuffling to occur for the formation of cysteine bridges. Some commonly used redox couples include cysteine/cystamine, glutathione/dithiobisGSH, cupric chloride, dithiothreitol DTT/dithiane DTT, and 2-mercaptoethanol (bME)/dithio-bME. In many instances, a co-solvent may be used to increase the efficiency of the refolding. Commonly used cosolvents include glycerol, polyethylene glycol of various molecular weights, and arginine.

[0113] In addition, the polypeptides can be synthesized in solution or on a solid support in accordance with conventional techniques. Various automatic synthesizers are commercially available and can be used in accordance with known protocols. See, for example, Stewart and Young, Solid Phase Peptide Synthesis, 2d. Ed., Pierce Chemical Co. (1984); Tam et al., J Am Chem Soc, 105:6442, (1983); Merrifield, Science 232:341-347 (1986); Barany and Merrifield, The Peptides, Gross and Meienhofer, eds, Academic Press, New York, 1-284; Barany et al., Int J Pep Protein Res, 30:705-739 (1987).

[0114] The polypeptides and proteins of the present disclosure can be purified according to protein purification techniques well known to those of skill in the art. These techniques involve, at one level, the crude fractionation of the proteinaceous and non-proteinaceous fractions. Having separated the peptide polypeptides from other proteins, the peptide or polypeptide of interest can be further purified using chromatographic and electrophoretic techniques to achieve partial or complete purification (or purification to homogeneity). The term “purified polypeptide” as used herein, is intended to refer to a composition, isolatable from other components, wherein the polypeptide is purified to any degree relative to its naturally-obtainable state. A purified polypeptide therefore also refers to a polypeptide that is free from the environment in which it may naturally occur. Generally, “purified” will refer to a polypeptide composition that has been subjected to fractionation to remove various other components, and which composition substantially retains its expressed biological activity. Where the term “substantially purified” is used, this designation will refer to a peptide or polypeptide composition in which the polypeptide or peptide forms the major component of the composition, such as constituting about 50%, about 60%, about 70%, about 80%, about 85%, or about 90% or more of the proteins in the composition.

[0115] Various techniques suitable for use in purification will be well known to those of skill in the art. These include, for example, precipitation with ammonium sulphate, PEG, antibodies (immunoprecipitation) and the like or by heat denaturation, followed by centrifugation; chromatography such as affinity chromatography (Protein-A columns), ion exchange, gel filtration, reverse phase, hydroxylapatite, hydrophobic interaction chromatography, isoelectric focusing, gel electrophoresis, and combinations of these techniques. As is generally known in the art, it is believed that the order of conducting the various purification steps may be changed, or that certain steps may be omitted, and still result in a suitable method for the preparation of a substantially purified polypeptide. Exemplary purification steps are provided in the Examples below.

[0116] Various methods for quantifying the degree of purification of polypeptide will be known to those of skill in the art in light of the present disclosure. These include, for example, determining the specific binding activity of an active fraction, or assessing the amount of peptide or polypeptide within a fraction by SDS/PAGE analysis. A preferred method for assessing the purity of a polypeptide fraction is to calculate the binding activity of the fraction, to compare it to the binding activity of the initial extract, and to thus calculate the degree of purification, herein assessed by a “-fold purification number.” The actual units used to represent the amount of binding activity will, of course, be dependent upon the particular assay technique chosen to follow the purification and whether or not the polypeptide or peptide exhibits a detectable binding activity.

### 7.5. Antibody

[0117] PD-1 antibodies can be purified from host cells that have been transfected by a gene encoding the antibodies by elution of filtered supernatant of host cell culture fluid using a Heparin HP column, using a salt gradient.

[0118] A Fab fragment is a monovalent fragment having the V_{L}, V_{H}, C_{L} and C_{H1} domains; a F(ab′)₂ fragment is a bivalent fragment having two Fab fragments linked by a disulfide bridge at the hinge region; a Fd fragment has the V_{H} and C_{H1} domains; an Fv fragment has the V_{L} and V_{H} domains of a single arm of an antibody; and a dAb fragment has a V_{H} domain, a V_{L} domain, or an antigen-binding fragment of a V_{H} or V_{L} domain (U.S. Pat. Nos. 6,846,634, 6,696,245, US App. Pub. No. 05/0202512, 04/0202995, 04/0038291, 04/0009507, 03/0039958, Ward et al., Nature 341:544-546, 1989).

[0119] Polynucleotide and polypeptide sequences of particular light and heavy chain variable domains are described below. Antibodies comprising a light chain and heavy chain are designated by combining the name of the light chain and the name of the heavy chain variable domains. For example, “L4H7,” indicates an antibody comprising the light chain variable domain of L4 (comprising a sequence of SEQ ID NO:4) and the heavy chain variable domain of H7 (comprising a sequence of SEQ ID NO:107). Light chain variable sequences are provided in SEQ ID Nos: 1-28, and heavy chain variable sequences are provided in SEQ ID Nos:101-128.

[0120] In other embodiments, an antibody may comprise a specific heavy or light chain, while the complementary light or heavy chain variable domain remains unspecified. In particular, certain embodiments herein include antibodies that bind a specific antigen (such as PD-1) by way of a specific light or heavy chain, such that the complementary heavy or light chain may be promiscuous, or even irrelevant, but may be determined by, for example, screening combinatorial libraries. Portolano et al., J. Immunol. V. 150 (3), pp. 880-887 (1993); Clackson et al., Nature v. 352 pp. 624-628 (1991); Adler et al., A natively paired antibody library yields drug leads with higher sensitivity and specificity than a randomly paired antibody library, MAbs (2018)); Adler et al., Rare, high-affinity mouse anti-PD-1 antibodies that function in checkpoint blockade, discovered using microfluidics and molecular genomics, MAbs (2017).

[0121] Naturally occurring immunoglobulin chains exhibit the same general structure of relatively conserved framework regions (FR) joined by three hypervariable regions, also called complementarity determining regions or CDRs. From N-terminus to C-terminus, both light and heavy chains comprise the domains FR1, CDR1, FR2, CDR2, FR3, CDR3 and FR4. The assignment of amino acids to each domain is in accordance with the definitions of Kabat et al. in Sequences of Proteins of Immunological Interest, 5th Ed., US Dept. of Health and Human Services, PHS, NIH, NIH Publication no. 91-3242, 1991.

[0122] The term “human antibody,” also referred to as “fully human antibody,” includes all antibodies that have one or more variable and constant regions derived from human immunoglobulin sequences. In one embodiment, all of the variable and constant domains are derived from human immunoglobulin sequences (a fully human antibody). These antibodies may be prepared in a variety of ways, examples of which are described below, including through the immunization with an antigen of interest of a mouse that is genetically modified to express antibodies derived from human heavy and/or light chain-encoding genes.

[0123] A humanized antibody has a sequence that differs from the sequence of an antibody derived from a non-human species by one or more amino acid substitutions, deletions, and/or additions, such that the humanized antibody is less likely to induce an immune response, and/or induces a less severe immune response, as compared to the non-human species antibody, when it is administered to a human subject. In one embodiment, certain amino acids in the framework and constant domains of the heavy and/or light chains of the non-human species antibody are mutated to produce the humanized antibody. In another embodiment, the constant domain(s) from a human antibody are fused to the variable domain(s) of a non-human species. In another embodiment, one or more amino acid residues in one or more CDR sequences of a non-human antibody are changed to reduce the likely immunogenicity of the non-human antibody when it is administered to a human subject, wherein the changed amino acid residues either are not critical for immunospecific binding of the antibody to its antigen, or the changes to the amino acid sequence that are made are conservative changes, such that the binding of the humanized antibody to the antigen is not significantly worse than the binding of the non-human antibody to the antigen. Examples of how to make humanized antibodies may be found in U.S. Pat. Nos. 6,054,297, 5,886,152 and 5,877,293.

[0124] The term “chimeric antibody” refers to an antibody that contains one or more regions from one antibody and one or more regions from one or more other antibodies. In one embodiment, one or more of the CDRs are derived from a human anti-PD-1 antibody. In another embodiment, all of the CDRs are derived from a human anti-PD-1 antibody. In another embodiment, the CDRs from more than one human anti-PD-1 antibodies are mixed and matched in a chimeric antibody. For instance, a chimeric antibody may comprise a CDR1 from the light chain of a first human anti-PD-1 antibody, a CDR2 and a CDR3 from the light chain of a second human anti-PD-1 antibody, and the CDRs from the heavy chain from a third anti-PD-1 antibody. Further, the framework regions may be derived from one of the same anti-PD-1 antibodies, from one or more different antibodies, such as a human antibody, or from a humanized antibody. In one example of a chimeric antibody, a portion of the heavy and/or light chain is identical with, homologous to, or derived from an antibody from a particular species or belonging to a particular antibody class or subclass, while the remainder of the chain(s) is/are identical with, homologous to, or derived from an antibody (-ies) from another species or belonging to another antibody class or subclass. Also included are fragments of such antibodies that exhibit the desired biological activity (i.e., the ability to specifically bind PD-1).

[0125] Fragments or analogs of antibodies can be readily prepared by those of ordinary skill in the art following the teachings of this specification and using techniques well-known in the art. Preferred amino- and carboxy-termini of fragments or analogs occur near boundaries of functional domains. Structural and functional domains can be identified by comparison of the nucleotide and/or amino acid sequence data to public or proprietary sequence databases. Computerized comparison methods can be used to identify sequence motifs or predicted protein conformation domains that occur in other proteins of known structure and/or function. Methods to identify protein sequences that fold into a known three-dimensional structure are known. See, e.g., Bowie et al., 1991, Science 253:164.

[0126] Antigen binding fragments derived from an antibody can be obtained, for example, by proteolytic hydrolysis of the antibody, for example, pepsin or papain digestion of whole antibodies according to conventional methods. By way of example, antibody fragments can be produced by enzymatic cleavage of antibodies with pepsin to provide a 5S fragment termed F(ab′)2. This fragment can be further cleaved using a thiol reducing agent to produce 3.5S Fab' monovalent fragments. Optionally, the cleavage reaction can be performed using a blocking group for the sulfhydryl groups that result from cleavage of disulfide linkages. As an alternative, an enzymatic cleavage using papain produces two monovalent Fab fragments and an Fc fragment directly. These methods are described, for example, by Goldenberg, U.S. Pat. No. 4,331,647, Nisonoff et al., Arch. Biochem. Biophys. 89:230, 1960; Porter, Biochem. J. 73:119, 1959; Edelman et al., in Methods in Enzymology 1:422 (Academic Press 1967); and by Andrews, S. M. and Titus, J.A. in Current Protocols in Immunology (Coligan J. E., et al., eds), John Wiley & Sons, New York (2003), pages 2.8.1 2.8.10 and 2.10A.1 2.10A.5. Other methods for cleaving antibodies, such as separating heavy chains to form monovalent light heavy chain fragments (Fd), further cleaving of fragments, or other enzymatic, chemical, or genetic techniques may also be used, so long as the fragments bind to the antigen that is recognized by the intact antibody.

[0127] An antibody fragment may also be any synthetic or genetically engineered protein. For example, antibody fragments include isolated fragments consisting of the light chain variable region, “Fv” fragments consisting of the variable regions of the heavy and light chains, recombinant single chain polypeptide molecules in which light and heavy variable regions are connected by a peptide linker (scFv proteins).

[0128] Another form of an antibody fragment is a peptide comprising one or more complementarity determining regions (CDRs) of an antibody. CDRs (also termed “minimal recognition units”, or “hypervariable region”) can be incorporated into a molecule either covalently or noncovalently to make it an antigen binding protein. CDRs can be obtained by constructing polynucleotides that encode the CDR of interest. Such polynucleotides are prepared, for example, by using the polymerase chain reaction to synthesize the variable region using mRNA of antibody producing cells as a template (see, for example, Larrick et al., Methods: A Companion to Methods in Enzymology 2:106, 1991; Courtenay Luck, “Genetic Manipulation of Monoclonal Antibodies,” in Monoclonal Antibodies: Production, Engineering and Clinical Application, Ritter et al. (eds.), page 166 (Cambridge University Press 1995); and Ward et al., “Genetic Manipulation and Expression of Antibodies,” in Monoclonal Antibodies: Principles and Applications, Birch et al., (eds.), page 137 (Wiley Liss, Inc. 1995).

[0129] Thus, in one embodiment, the binding agent comprises at least one CDR as described herein. The binding agent may comprise at least two, three, four, five or six CDR's as described herein. The binding agent may further comprise at least one variable region domain of an antibody described herein. The variable region domain may be of any size or amino acid composition and will generally comprise at least one CDR sequence responsible for binding to human PD-1, for example CDR1-H, CDR2-H, CDR3-H, CDR1-L, CDR2-L, and CDR3-L, specifically described herein and which is adjacent to or in frame with one or more framework sequences. In general terms, the variable (V) region domain may be any suitable arrangement of immunoglobulin heavy (V_{H}) and/or light (V_{L}) chain variable domains. Thus, for example, the V region domain may be monomeric and be a V_{H} or V_{L} domain, which is capable of independently binding human PD-1 with an affinity at least equal to 1×10⁷M or less as described below. Alternatively, the V region domain may be dimeric and contain V_{H} V_{H}, V_{H} V_{L}, or V_{L} V_{L}, dimers. The V region dimer comprises at least one V_{H} and at least one V_{L} chain that may be non-covalently associated (hereinafter referred to as Fv). If desired, the chains may be covalently coupled either directly, for example via a disulfide bond between the two variable domains, or through a linker, for example a peptide linker, to form a single chain Fv (scFV).

[0130] The variable region domain may be any naturally occurring variable domain or an engineered version thereof. By engineered version is meant a variable region domain that has been created using recombinant DNA engineering techniques. Such engineered versions include those created, for example, from a specific antibody variable region by insertions, deletions, or changes in or to the amino acid sequences of the specific antibody. Particular examples include engineered variable region domains containing at least one CDR and optionally one or more framework amino acids from a first antibody and the remainder of the variable region domain from a second antibody.

[0131] The variable region domain may be covalently attached at a C terminal amino acid to at least one other antibody domain or a fragment thereof. Thus, for example, a V_{H} domain that is present in the variable region domain may be linked to an immunoglobulin CH1 domain, or a fragment thereof. Similarly a V_{L} domain may be linked to a CK domain or a fragment thereof. In this way, for example, the antibody may be a Fab fragment wherein the antigen binding domain contains associated V_{H} and V_{L} domains covalently linked at their C termini to a CH1 and CK domain, respectively. The CH1 domain may be extended with further amino acids, for example to provide a hinge region or a portion of a hinge region domain as found in a Fab′ fragment, or to provide further domains, such as antibody CH2 and CH3 domains.

[0132] As described herein, antibodies comprise at least one of these CDRs. For example, one or more CDR may be incorporated into known antibody framework regions (IgG1, IgG2, etc.), or conjugated to a suitable vehicle to enhance the half-life thereof. Suitable vehicles include, but are not limited to Fc, polyethylene glycol (PEG), albumin, transferrin, and the like. These and other suitable vehicles are known in the art. Such conjugated CDR peptides may be in monomeric, dimeric, tetrameric, or other form. In one embodiment, one or more water-soluble polymer is bonded at one or more specific position, for example at the amino terminus, of a binding agent.

[0133] In another example, individual V_{L} or V_{H} chains from an antibody (i.e. PD-1 antibody) can be used to search for other V_{H} or V_{L} chains that could form antigen-binding fragments (or Fab), with the same specificity. Thus, random combinations of V_{H} and V_{L} chain Ig genes can be expressed as antigen-binding fragments in a bacteriophage library (such as fd or lambda phage). For instance, a combinatorial library may be generated by utilizing the parent V_{L} or V_{H} chain library combined with antigen-binding specific V_{L} or V_{H} chain libraries, respectively. The combinatorial libraries may then be screened by conventional techniques, for example by using radioactively labeled probe (such as radioactively labeled PD-1). See, for example, Portolano et al., J. Immunol. V. 150 (3) pp. 880-887 (1993).

[0134] Diabodies are bivalent antibodies comprising two polypeptide chains, wherein each polypeptide chain comprises V_{H} and V_{L} domains joined by a linker that is too short to allow for pairing between two domains on the same chain, thus allowing each domain to pair with a complementary domain on another polypeptide chain (see, e.g., Holliger et al., 1993, Proc. Natl. Acad. Sci. USA 90:6444-48, and Poljak et al., 1994, Structure 2:1121-23). If the two polypeptide chains of a diabody are identical, then a diabody resulting from their pairing will have two identical antigen binding sites. Polypeptide chains having different sequences can be used to make a diabody with two different antigen binding sites. Similarly, tribodies and tetrabodies are antibodies comprising three and four polypeptide chains, respectively, and forming three and four antigen binding sites, respectively, which can be the same or different.

[0135] Antibody polypeptides are also disclosed in U.S. Pat. No. 6,703,199, including fibronectin polypeptide monobodies. Other antibody polypeptides are disclosed in U.S. Patent Publication 2005/0238646, which are single-chain polypeptides.

[0136] In certain embodiments, an antibody comprises one or more water soluble polymer attachments, including, but not limited to, polyethylene glycol, polyoxyethylene glycol, or polypropylene glycol. See, e.g., U.S. Pat. Nos. 4,640,835, 4,496,689, 4,301,144, 4,670,417, 4,791,192 and 4,179,337. In certain embodiments, a derivative binding agent comprises one or more of monomethoxy-polyethylene glycol, dextran, cellulose, or other carbohydrate based polymers, poly-(N-vinyl pyrrolidone)-polyethylene glycol, propylene glycol homopolymers, a polypropylene oxide/ethylene oxide co-polymer, polyoxyethylated polyols (e.g., glycerol) and polyvinyl alcohol, as well as mixtures of such polymers. In certain embodiments, one or more water-soluble polymer is randomly attached to one or more side chains. In certain embodiments, PEG can act to improve the therapeutic capacity for a binding agent, such as an antibody. Certain such methods are discussed, for example, in U.S. Pat. No. 6,133,426, which is hereby incorporated by reference for any purpose.

### 7.6. Antigen Binding Protein

[0137] In one aspect, the present disclosure provides antigen binding proteins (e.g., antibodies, antibody fragments, antibody derivatives, antibody muteins, and antibody variants), that bind to PD-1.

[0138] An antigen binding protein can have, for example, the structure of a naturally occurring immunoglobulin. An “immunoglobulin” is a tetrameric molecule. In a naturally occurring immunoglobulin, each tetramer is composed of two identical pairs of polypeptide chains, each pair having one “light” (about 25 kDa) and one “heavy” chain (about 50-70 kDa). The amino-terminal portion of each chain includes a variable region of about 100 to 110 or more amino acids primarily responsible for antigen recognition. The carboxy-terminal portion of each chain defines a constant region primarily responsible for effector function. Human light chains are classified as kappa and lambda light chains. Heavy chains are classified as mu, delta, gamma, alpha, or epsilon, and define the antibody's isotype as IgM, IgD, IgG, IgA, and IgE, respectively. Within light and heavy chains, the variable and constant regions are joined by a “J” region of about 12 or more amino acids, with the heavy chain also including a “D” region of about 10 more amino acids. See generally, Fundamental Immunology Ch. 7 (Paul, W., ed., 2nd ed. Raven Press, N.Y. (1989)) (incorporated by reference in its entirety for all purposes). The variable regions of each light/heavy chain pair form the antibody binding site such that an intact immunoglobulin has two binding sites.

[0139] Antigen binding proteins in accordance with the present disclosure include antigen binding proteins that inhibit a biological activity of PD-1.

[0140] Different antigen binding proteins may bind to different domains of PD-1 or act by different mechanisms of action. As indicated herein inter alia, the domain region are designated such as to be inclusive of the group, unless otherwise indicated. For example, amino acids 4-12 refers to nine amino acids: amino acids at positions 4, and 12, as well as the seven intervening amino acids in the sequence. Other examples include antigen binding proteins that inhibit binding of PD-1 to PD-L1. An antigen binding protein need not completely inhibit a PD-1-induced activity to find use in the present disclosure; rather, antigen binding proteins that reduce a particular activity of PD-1 are contemplated for use as well. (Discussions herein of particular mechanisms of action for PD-1-binding antigen binding proteins in treating particular diseases are illustrative only, and the methods presented herein are not bound thereby.)

[0141] In another aspect, the present disclosure provides antigen binding proteins that comprise a light chain variable region selected from the group consisting of A1LC-A28LC or a heavy chain variable region selected from the group consisting of A1HC-A28HC, and fragments, derivatives, muteins, and variants thereof. Such an antigen binding protein can be denoted using the nomenclature “LxHy,” wherein “x” corresponds to the number of the light chain variable region and “y” corresponds to the number of the heavy chain variable region as they are labeled in the sequences below. That is to say, for example, that “A1HC” denotes the heavy chain variable region comprising the amino acid sequence of SEQ ID NO: 101; “A1LC” denotes the light chain variable region comprising the amino acid sequence of SEQ ID NO:1, and so forth. More generally speaking, “L2H1” refers to an antigen binding protein with a light chain variable region comprising the amino acid sequence of L2 (SEQ ID NO:2) and a heavy chain variable region comprising the amino acid sequence of H1 (SEQ ID NO:101). For clarity, all ranges denoted by at least two members of a group include all members of the group between and including the end range members. Thus, the group range A1-A28, includes all members between A1 and A28, as well as members Al and A28 themselves. The group range A4-A6 includes members A4, A5, and A6, etc.

[0142] In some embodiments, antigen binding proteins comprise variable (V(D)J) regions of both heavy and light chain sequences identical to one of the clones in the library of PD-1 binding clones, deposited under ATCC Accession No. PTA-125509. In some embodiments, antigen binding proteins comprise variable (V(D)J) regions of either heavy or light chain sequence identical to one of the clones in the library of PD-1 binding clones, deposited under ATCC Accession No. PTA-125509. In some embodiments, antigen binding proteins are expressed from the expression vector in one of the clones in the library of PD-1 binding clones, deposited under ATCC Accession No. PTA-125509.

[0143] Also shown below are the locations of the CDRs (underlined) that create part of the antigen-binding site, while the Framework Regions (FRs) are the intervening segments of these variable domain sequences. In both light chain variable regions and heavy chain variable regions there are three CDRs (CDR1-3) and four FRs (FR 1-4). The CDR regions of each light and heavy chain also are grouped by antibody type (A1, A2, A3, etc.). Antigen binding proteins of the present disclosure include, for example, antigen binding proteins having a combination of light chain and heavy chain variable domains selected from the group of combinations consisting of L1H1 (antibody Al), L2H2 (antibody A2), L3H3 (antibody A3), L4H4 (antibody A4), L5H5 (antibody A5), L6H6 (antibody A6), L7H7 (antibody A7), L8H8 (antibody A8), L9H9 (antibody A9), L10H10 (antibody A10), L11H11 (antibody A11), L12H12 (antibody A12), L13H13 (antibody A13), L14H14 (antibody 14), L15H15 (antibody 15), L16H16 (antibody 16), L17H17 (antibody 17), L18H18 (antibody 18), L19H19 (antibody 19), L20H20 (antibody 20), L21H21 (antibody 21), L22H22 (antibody 22), L23H23 (antibody 23), L24H24 (antibody 24), L25H25 (antibody 25), L26H26 (antibody 26), L27H27 (antibody 27) and L28H28 (antibody 28).

[0144] In some embodiments, antigen binding proteins comprise all six CDR sequences (three CDRs of light chain and three CDRs of heavy chain) identical to one of the clones in the library of PD-1 binding clones, deposited under ATCC Accession No. PTA-125509. In some embodiments, antigen binding proteins comprise three out of six CDR sequences (three CDRs of light chain or three CDRs of heavy chain) identical to one of the clones in the library of PD-1 binding clones, deposited under ATCC Accession No. PTA-125509. In some embodiments, antigen binding proteins comprise one, two, three, four, or five out of six CDR sequences identical to one of the clones in the library of PD-1 binding clones, deposited under ATCC Accession No. PTA-125509.

[0145] In one embodiment, the present disclosure provides an antigen binding protein comprising a light chain variable domain comprising a sequence of amino acids that differs from the sequence of a light chain variable domain selected from the group consisting of L1 through L28 only at 15, 14, 13, 12, 11, 10, 9, 8, 7, 6, 5, 4, 3, 2, or 1 residues, wherein each such sequence difference is independently either a deletion, insertion, or substitution of one amino acid residue. In another embodiment, the light-chain variable domain comprises a sequence of amino acids that is at least 70%, 75%, 80%, 85%, 90%, 95%, 96%, 97%, 98% or 99% identical to the sequence of a light chain variable domain selected from the group consisting of L1-L28. In another embodiment, the light chain variable domain comprises a sequence of amino acids that is encoded by a nucleotide sequence that is at least 70%, 75%, 80%, 85%, 90%, 95%, 96%, 97%, 98%, or 99% identical to a nucleotide sequence that encodes a light chain variable domain selected from the group consisting of L1-L28 (which includes L1, L2, L3, L4, L5, L6, L7, L8, L9, L10, L11, L12, L13, L14, L15, L16, L17, L18, L19, L20, L21, L22, L23, L24, L25, L26, L27, and L28). In another embodiment, the light chain variable domain comprises a sequence of amino acids that is encoded by a polynucleotide that hybridizes under moderately stringent conditions to the complement of a polynucleotide that encodes a light chain variable domain selected from the group consisting of L1-L28. In another embodiment, the light chain variable domain comprises a sequence of amino acids that is encoded by a polynucleotide that hybridizes under moderately stringent conditions to the complement of a polynucleotide that encodes a light chain variable domain selected from the group consisting of L1-L28. In another embodiment, the light chain variable domain comprises a sequence of amino acids that is encoded by a polynucleotide that hybridizes under moderately stringent conditions to a complement of a light chain polynucleotide of L1-L28.

[0146] In one embodiment, the present disclosure provides an antigen binding protein comprising a light chain variable domain comprising a sequence of amino acids that differs from the sequence of a light chain variable domain encoded by one of the clones of the library of PD-1 binding clones, deposited under ATCC Accession No. PTA-125509, only at 15, 14, 13, 12, 11, 10, 9, 8, 7, 6, 5, 4, 3, 2, or 1 residues, wherein each such sequence difference is independently either a deletion, insertion, or substitution of one amino acid residue. In another embodiment, the light-chain variable domain comprises a sequence of amino acids that is at least 70%, 75%, 80%, 85%, 90%, 95%, 96%, 97%, 98%, or 99% identical to the sequence of a light chain variable domain encoded by one of the clones of the library of PD-1 binding clones, deposited under ATCC Accession No. PTA-125509. In another embodiment, the light chain variable domain comprises a sequence of amino acids that is encoded by a nucleotide sequence that is at least 70%, 75%, 80%, 85%, 90%, 95%, 96%, 97%, 98%, or 99% identical to a nucleotide sequence of one of the clones of the library of PD-1 binding clones, deposited under ATCC Accession No. PTA-125509.

[0147] In another embodiment, the present disclosure provides an antigen binding protein comprising a heavy chain variable domain comprising a sequence of amino acids that differs from the sequence of a heavy chain variable domain selected from the group consisting of H1-H28 only at 15, 14, 13, 12, 11, 10, 9, 8, 7, 6, 5, 4, 3, 2, or 1 residue(s), wherein each such sequence difference is independently either a deletion, insertion, or substitution of one amino acid residue. In another embodiment, the heavy chain variable domain comprises a sequence of amino acids that is at least 70%, 75%, 80%, 85%, 90%, 95%, 96%, 97%, 98%, or 99% identical to the sequence of a heavy chain variable domain selected from the group consisting of H1-H28. In another embodiment, the heavy chain variable domain comprises a sequence of amino acids that is encoded by a nucleotide sequence that is at least 70%, 75%, 80%, 85%, 90%, 95%, 96%, 97%, 98%, or 99% identical to a nucleotide sequence that encodes a heavy chain variable domain selected from the group consisting of H1-H28. In another embodiment, the heavy chain variable domain comprises a sequence of amino acids that is encoded by a polynucleotide that hybridizes under moderately stringent conditions to the complement of a polynucleotide that encodes a heavy chain variable domain selected from the group consisting of H1-H28. In another embodiment, the heavy chain variable domain comprises a sequence of amino acids that is encoded by a polynucleotide that hybridizes under moderately stringent conditions to the complement of a polynucleotide that encodes a heavy chain variable domain selected from the group consisting of H1-H28. In another embodiment, the heavy chain variable domain comprises a sequence of amino acids that is encoded by a polynucleotide that hybridizes under moderately stringent conditions to a complement of a heavy chain polynucleotide disclosed herein.

[0148] In one embodiment, the present disclosure provides an antigen binding protein comprising a heavy chain variable domain comprising a sequence of amino acids that differs from the sequence of a heavy chain variable domain encoded by one of the clones of the library of PD-1 binding clones, deposited under ATCC Accession No. PTA-125509, only at 15, 14, 13, 12, 11, 10, 9, 8, 7, 6, 5, 4, 3, 2, or 1 residues, wherein each such sequence difference is independently either a deletion, insertion, or substitution of one amino acid residue. In another embodiment, the heavy chain variable domain comprises a sequence of amino acids that is at least 70%, 75%, 80%, 85%, 90%, 95%, 96%, 97%, 98%, or 99% identical to the sequence of a heavy chain variable domain encoded by one of the clones of the library of PD-1 binding clones, deposited under ATCC Accession No. PTA-125509. In another embodiment, the heavy chain variable domain comprises a sequence of amino acids that is encoded by a nucleotide sequence that is at least 70%, 75%, 80%, 85%, 90%, 95%, 96%, 97%, 98%, or 99% identical to a nucleotide sequence of one of the clones of the library of PD-1 binding clones, deposited under ATCC Accession No. PTA-125509.

[0149] Particular embodiments of antigen binding proteins of the present disclosure comprise one or more amino acid sequences that are identical to the amino acid sequences of one or more of the CDRs and/or FRs referenced herein. In one embodiment, the antigen binding protein comprises a light chain CDR1 sequence illustrated above. In another embodiment, the antigen binding protein comprises a light chain CDR2 sequence illustrated above. In another embodiment, the antigen binding protein comprises a light chain CDR3 sequence illustrated above. In another embodiment, the antigen binding protein comprises a heavy chain CDR1 sequence illustrated above. In another embodiment, the antigen binding protein comprises a heavy chain CDR2 sequence illustrated above. In another embodiment, the antigen binding protein comprises a heavy chain CDR3 sequence illustrated above.

[0150] In one embodiment, the present disclosure provides an antigen binding protein that comprises one or more CDR sequences that differ from a CDR sequence shown above by no more than 5, 4, 3, 2, or 1 amino acid residues.

[0151] In some embodiments, at least one of the antigen binding protein's CDR1 sequences is a CDR1 sequence from A1-A28, CDR1-L1 to 28 or CDR1-H1 to 28 as shown in TABLES 5 or 9, or their consensus sequences, as shown in TABLE 7. In some embodiments, at least one of the antigen binding protein's CDR2 sequences is a CDR2 sequence from A1-A28, CDR2-L1 to 28, or CDR2-H1 to 28 as shown in TABLES 5 or 9, or their consensus sequences, as shown in TABLE 7. In some embodiments, at least one of the antigen binding protein's CDR3 sequences is a CDR3 sequence from A1-A28, CDR3-L1 to 28, or CDR3-H1 to 28 as shown in TABLES 5 or 9, or their consensus sequences, as shown in TABLE 7.

[0152] In another embodiment, the antigen binding protein's light chain CDR3 sequence is a light chain CDR3 sequence from A1-A28 or CDR3-L1 to 28, as shown in TABLES 5 or 9, or their consensus sequences, as shown in TABLE 7 and the antigen binding protein's heavy chain CDR3 sequence is a heavy chain sequence from A1-A28 or CDR-H1 to 28, as shown in TABLES 5 or 9, or their consensus sequences, as shown in TABLE 7.

[0153] In another embodiment, the antigen binding protein comprises 1, 2, 3, 4, or 5 CDR sequence(s) that each independently differs by 6, 5, 4, 3, 2, 1, or 0 single amino acid additions, substitutions, and/or deletions from a CDR sequence of A1-A28, and the antigen binding protein further comprises 1, 2, 3, 4, or 5 CDR sequence(s) that each independently differs by 6, 5, 4, 3, 2, 1, or 0 single amino acid additions, substitutions, and/or deletions from a CDR sequence. In some embodiments, the antigen binding protein comprises 1, 2, 3, 4, or 5 CDR sequence(s) that each has at least 50%, 55%, 60%, 65%, 70%, 75%, 80%, 85%, 90%, 95%, 96%, 97%, 98%, or 99% sequence identity to a CDR sequence of A1-A28.

[0154] The nucleotide sequences of A1-A28, or the amino acid sequences of A1-A28, can be altered, for example, by random mutagenesis or by site-directed mutagenesis (e.g., oligonucleotide-directed site-specific mutagenesis) to create an altered polynucleotide comprising one or more particular nucleotide substitutions, deletions, or insertions as compared to the non-mutated polynucleotide. Examples of techniques for making such alterations are described in Walder et al., 1986, Gene 42:133; Bauer et al. 1985, Gene 37:73; Craik, BioTechniques, January 1985, 12-19; Smith et al., 1981, Genetic Engineering: Principles and Methods, Plenum Press; and U.S. Patent Nos. 4,518,584 and 4,737,462. These and other methods can be used to make, for example, derivatives of anti-PD-1 antibodies that have a desired property, for example, increased affinity, avidity, or specificity for PD-1, increased activity or stability in vivo or in vitro, or reduced in vivo side-effects as compared to the underivatized antibody.

[0155] Other derivatives of anti-PD-1 antibodies within the scope of this disclosure include covalent or aggregative conjugates of anti-PD-1 antibodies, or fragments thereof, with other proteins or polypeptides, such as by expression of recombinant fusion proteins comprising heterologous polypeptides fused to the N-terminus or C-terminus of an anti-PD-1 antibody polypeptide. For example, the conjugated peptide may be a heterologous signal (or leader) polypeptide, e.g., the yeast alpha-factor leader, or a peptide such as an epitope tag. Antigen binding protein-containing fusion proteins can comprise peptides added to facilitate purification or identification of antigen binding protein (e.g., poly-His). An antigen binding protein also can be linked to the FLAG peptide Asp-Tyr-Lys-Asp-Asp-Asp-Asp-Lys (DYK_{D} DDDK) (SEQ ID NO: 12191) as described in Hopp et al., Bio/Technology 6:1204, 1988, and U.S. Pat. No. 5,011,912. The FLAG peptide is highly antigenic and provides an epitope reversibly bound by a specific monoclonal antibody (mAb), enabling rapid assay and facile purification of expressed recombinant protein. Reagents useful for preparing fusion proteins in which the FLAG peptide is fused to a given polypeptide are commercially available (Sigma, St. Louis, Mo.).

[0156] One suitable Fc polypeptide, described in PCT application WO 93/10151 (hereby incorporated by reference), is a single chain polypeptide extending from the N-terminal hinge region to the native C-terminus of the Fc region of a human IgG1 antibody. Another useful Fc polypeptide is the Fc mutein described in U.S. Pat. No. 5,457,035 and in Baum et al., 1994, EMBO J. 13:3992-4001. The amino acid sequence of this mutein is identical to that of the native Fc sequence presented in WO 93/10151, except that amino acid 19 has been changed from Leu to Ala, amino acid 20 has been changed from Leu to Glu, and amino acid 22 has been changed from Gly to Ala. The mutein exhibits reduced affinity for Fc receptors.

[0157] In other embodiments, the variable portion of the heavy and/or light chains of an anti-PD-1 antibody may be substituted for the variable portion of an antibody heavy and/or light chain.

[0158] Oligomers that contain one or more antigen binding proteins may be employed as PD-1 antagonists. Oligomers may be in the form of covalently-linked or non-covalently-linked dimers, trimers, or higher oligomers. Oligomers comprising two or more antigen binding protein are contemplated for use, with one example being a homodimer. Other oligomers include heterodimers, homotrimers, heterotrimers, homotetramers, heterotetramers, etc.

[0159] One embodiment is directed to oligomers comprising multiple antigen binding proteins joined via covalent or non-covalent interactions between peptide moieties fused to the antigen binding proteins. Such peptides may be peptide linkers (spacers), or peptides that have the property of promoting oligomerization. Leucine zippers and certain polypeptides derived from antibodies are among the peptides that can promote oligomerization of antigen binding proteins attached thereto, as described in more detail below.

[0160] In particular embodiments, the oligomers comprise from two to four antigen binding proteins. The antigen binding proteins of the oligomer may be in any form, such as any of the forms described above, e.g., variants or fragments. Preferably, the oligomers comprise antigen binding proteins that have PD-1 binding activity.

[0161] In one embodiment, an oligomer is prepared using polypeptides derived from immunoglobulins. Preparation of fusion proteins comprising certain heterologous polypeptides fused to various portions of antibody-derived polypeptides (including the Fc domain) has been described, e.g., by Ashkenazi et al., 1991, PNAS USA 88:10535; Byrn et al., 1990, Nature 344:677; and Hollenbaugh et al., 1992 Curr. Prot.s in Immunol., Suppl. 4, pages 10.19.1 -10.19.11.

[0162] One embodiment of the present disclosure is directed to a dimer comprising two fusion proteins created by fusing a PD-1 binding fragment of an anti-PD-1 antibody to the Fc region of an antibody. The dimer can be made by, for example, inserting a gene fusion encoding the fusion protein into an appropriate expression vector, expressing the gene fusion in host cells transformed with the recombinant expression vector, and allowing the expressed fusion protein to assemble much like antibody molecules, whereupon interchain disulfide bonds form between the Fc moieties to yield the dimer.

[0163] Alternatively, the oligomer is a fusion protein comprising multiple antigen binding proteins, with or without peptide linkers (spacer peptides). Among the suitable peptide linkers are those described in U.S. Pat. Nos. 4,751,180 and 4,935,233.

[0164] Another method for preparing oligomeric antigen binding proteins involves use of a leucine zipper. Leucine zipper domains are peptides that promote oligomerization of the proteins in which they are found. Leucine zippers were originally identified in several DNA-binding proteins (Landschulz et al., 1988, Science 240:1759), and have since been found in a variety of different proteins. Among the known leucine zippers are naturally occurring peptides and derivatives thereof that dimerize or trimerize. Examples of leucine zipper domains suitable for producing soluble oligomeric proteins are described in PCT application WO 94/10308, and the leucine zipper derived from lung surfactant protein D (SPD) described in Hoppe et al., 1994, FEBS Letters 344:191, hereby incorporated by reference. The use of a modified leucine zipper that allows for stable trimerization of a heterologous protein fused thereto is described in Fanslow et al., 1994, Semin. Immunol. 6:267-78. In one approach, recombinant fusion proteins comprising an anti-PD-1 antibody fragment or derivative fused to a leucine zipper peptide are expressed in suitable host cells, and the soluble oligomeric anti-PD-1 antibody fragments or derivatives that form are recovered from the culture supernatant.

[0165] In one aspect, the present disclosure provides antigen binding proteins that interfere with the binding of PD-1 to a PD-L1. Such antigen binding proteins can be made against PD-1, or a fragment, variant or derivative thereof, and screened in conventional assays for the ability to interfere with binding of PD-1 to PD-L1. Examples of suitable assays are assays that test the antigen binding proteins for the ability to inhibit binding of PD-L1 to cells expressing PD-1, or that test antigen binding proteins for the ability to reduce a biological or cellular response that results from the binding of PD-L1 to cell surface PD-1. For example, antibodies can be screened according to their ability to bind to immobilized antibody surfaces (PD-1). Antigen binding proteins that block the binding of PD-1 to a PD-L1 can be employed in treating any PD-1-related condition, including but not limited to cachexia. In an embodiment, a human anti-PD-1 monoclonal antibody generated by procedures involving immunization of transgenic mice is employed in treating such conditions.

[0166] Antigen-binding fragments of antigen binding proteins of the present disclosure can be produced by conventional techniques. Examples of such fragments include, but are not limited to, Fab and F(ab′)₂ fragments. Antibody fragments and derivatives produced by genetic engineering techniques also are contemplated.

[0167] Additional embodiments include chimeric antibodies, e.g., humanized versions of non-human (e.g., murine) monoclonal antibodies. Such humanized antibodies may be prepared by known techniques, and offer the advantage of reduced immunogenicity when the antibodies are administered to humans. In one embodiment, a humanized monoclonal antibody comprises the variable domain of a murine antibody (or all or part of the antigen binding site thereof) and a constant domain derived from a human antibody. Alternatively, a humanized antibody fragment may comprise the antigen binding site of a murine monoclonal antibody and a variable domain fragment (lacking the antigen-binding site) derived from a human antibody. Procedures for the production of chimeric and further engineered monoclonal antibodies include those described in Riechmann et al., 1988, Nature 332:323, Liu et al., 1987, Proc. Nat. Acad. Sci. USA 84:3439, Larrick et al., 1989, Bio/Technology 7:934, and Winter et al., 1993, TIPS 14:139. In one embodiment, the chimeric antibody is a CDR grafted antibody. Techniques for humanizing antibodies are discussed in, e.g., U.S. Pat. Nos. 5,869,619, 5,225,539, 5,821,337, 5,859,205, 6,881,557, Padlan et al., 1995, FASEB J. 9:133-39, and Tamura et al., 2000, J. Immunol. 164:1432-41.

[0168] Procedures have been developed for generating human or partially human antibodies in non-human animals. For example, mice in which one or more endogenous immunoglobulin genes have been inactivated by various means have been prepared. Human immunoglobulin genes have been introduced into the mice to replace the inactivated mouse genes. Antibodies produced in the animal incorporate human immunoglobulin polypeptide chains encoded by the human genetic material introduced into the animal. In one embodiment, a non-human animal, such as a transgenic mouse, is immunized with a PD-1 polypeptide, such that antibodies directed against the PD-1 polypeptide are generated in the animal.

[0169] One example of a suitable immunogen is a soluble human PD-1, such as a polypeptide comprising the extracellular domain of the protein having the following sequence: SEQ ID: 7001 or other immunogenic fragment of the protein. Examples of techniques for production and use of transgenic animals for the production of human or partially human antibodies are described in U.S. Pat. Nos. 5,814,318, 5,569,825, and 5,545,806, Davis et al., 2003, Production of human antibodies from transgenic mice in Lo, ed. Antibody Engineering: Methods and Protocols, Humana Press, NJ:191-200, Kellermann et al., 2002, Curr Opin Biotechnol. 13:593-97, Russel et al., 2000, Infect Immun. 68:1820-26, Gallo et al., 2000, Eur J Immun. 30:534-40, Davis et al., 1999, Cancer Metastasis Rev. 18:421-25, Green, 1999, J Immunol Methods. 231:11-23, Jakobovits, 1998, Advanced Drug Delivery Reviews 31:33-42, Green et al., 1998, J Exp Med. 188:483-95, Jakobovits A, 1998, Exp. Opin. Invest. Drugs. 7:607-14, Tsuda et al., 1997, Genomics. 42:413-21, Mendez et al., 1997, Nat Genet. 15:146-56, Jakobovits, 1994, Curr Biol. 4:761-63, Arbones et al., 1994, Immunity. 1:247-60, Green et al., 1994, Nat Genet. 7:13-21, Jakobovits et al., 1993, Nature. 362:255-58, Jakobovits et al., 1993, Proc Natl Acad Sci USA. 90:2551-55. Chen, J., M. Trounstine, F. W. Alt, F. Young, C. Kurahara, J. Loring, D. Huszar. Inter'l Immunol. 5 (1993): 647-656, Choi et al., 1993, Nature Genetics 4: 117-23, Fishwild et al., 1996, Nature Biotech. 14: 845-51, Harding et al., 1995, Annals of the New York Academy of Sciences, Lonberg et al., 1994, Nature 368: 856-59, Lonberg, 1994, Transgenic Approaches to Human Monoclonal Antibodies in Handbook of Experimental Pharmacology 113: 49-101, Lonberg et al., 1995, Internal Review of Immunology 13: 65-93, Neuberger, 1996, Nature Biotechnology 14: 826, Taylor et al., 1992, Nucleic Acids Res. 20: 6287-95, Taylor et al., 1994, Inter'l Immunol. 6: 579-91, Tomizuka et al., 1997, Nature Genetics 16: 133-43, Tomizuka et al., 2000, Pro. Nat'l Acad. Sci. USA 97: 722-27, Tuaillon et al., 1993, Pro.Nat'lAcad.Sci. USA 90: 3720-24, and Tuaillon et al., 1994, J. Immunol. 152: 2912-20.

[0170] Antigen binding proteins (e.g., antibodies, antibody fragments, and antibody derivatives) of the present disclosure can comprise any constant region known in the art. The light chain constant region can be, for example, a kappa- or lambda-type light chain constant region, e.g., a human kappa- or lambda-type light chain constant region. The heavy chain constant region can be, for example, an alpha-, delta-, epsilon-, gamma-, or mu-type heavy chain constant regions, e.g., a human alpha-, delta-, epsilon-, gamma-, or mu-type heavy chain constant region. In one embodiment, the light or heavy chain constant region is a fragment, derivative, variant, or mutein of a naturally occurring constant region.

[0171] Techniques are known for deriving an antibody of a different subclass or isotype from an antibody of interest, i.e., subclass switching. Thus, IgG antibodies may be derived from an IgM antibody, for example, and vice versa. Such techniques allow the preparation of new antibodies that possess the antigen-binding properties of a given antibody (the parent antibody), but also exhibit biological properties associated with an antibody isotype or subclass different from that of the parent antibody. Recombinant DNA techniques may be employed. Cloned DNA encoding particular antibody polypeptides may be employed in such procedures, e.g., DNA encoding the constant domain of an antibody of the desired isotype. See also Lantto et al., 2002, Methods Mol. Biol. 178:303-16.

[0172] In one embodiment, an antigen binding protein of the present disclosure comprises the IgG1 heavy chain domain of any of A1-A28 (H1-H28) or a fragment of the IgG1 heavy chain domain of any of A1-A28 (H1-H28). In another embodiment, an antigen binding protein of the present disclosure comprises the kappa light chain constant chain region of A1-A28 (L1-L28), or a fragment of the kappa light chain constant region of A1-A28 (L1-L28). In another embodiment, an antigen binding protein of the present disclosure comprises both the IgG1 heavy chain domain, or a fragment thereof, of A1-A28 (L1-L28) and the kappa light chain domain, or a fragment thereof, of A1-A28 (L1-L28).

[0173] Accordingly, the antigen binding proteins of the present disclosure include those comprising, for example, the variable domain combinations L1H1, L2H2, L3H3, L4H4, L5H5, L6H6, L7H7, L8H8, L9H9, L10H10, L11H11, L12H12, L13H13, L14H14, L15H15, L16H16, L17H17, L18H18, L19H19, L20H20, L21H21, L22H22, L23H23, L24H24, L25H25, L26H26, L27H27, L28H28, having a desired isotype (for example, IgA, IgG1, IgG2, IgG3, IgG4, IgM, IgE, and IgD) as well as Fab or F(ab′)₂ fragments thereof. Moreover, if an IgG4 is desired, it may also be desired to introduce a point mutation (CPSCP (SEQ ID NO: 12192)→CPPCP (SEQ ID NO: 12193)) in the hinge region as described in Bloom et al., 1997, Protein Science 6:407, incorporated by reference herein) to alleviate a tendency to form intra-H chain disulfide bonds that can lead to heterogeneity in the IgG4 antibodies.

[0174] In one embodiment, the antigen binding protein has a K_{off} of 1×10⁻⁴ s⁻¹ or lower. In another embodiment, the K_{off} is 5×10⁻⁵ s⁻¹ or lower. In another embodiment, the K_{off} is substantially the same as an antibody having a combination of light chain and heavy chain variable domain sequences selected from the group of combinations consisting of L1H1, L2H2, L3H3, L4H4, L5H5, L6H6, . . . and L28H28. In another embodiment, the antigen binding protein binds to PD-1 with substantially the same Koff as an antibody that comprises one or more CDRs from an antibody having a combination of light chain and heavy chain variable domain sequences selected from the group of combinations consisting of L1H1, L2H2, L3H3, L4H4, L5H5, L6H6, . . . and L28H28. In another embodiment, the antigen binding protein binds to PD-1 with substantially the same Koff as an antibody that comprises one of the amino acid sequences illustrated above. In another embodiment, the antigen binding protein binds to PD-1 with substantially the same Koff as an antibody that comprises one or more CDRs from an antibody that comprises one of the amino acid sequences illustrated above.

[0175] In one aspect, the present disclosure provides antigen-binding fragments of an anti-PD-1 antibody of the present disclosure. Such fragments can consist entirely of antibody-derived sequences or can comprise additional sequences. Examples of antigen-binding fragments include Fab, F(ab′)2, single chain antibodies, diabodies, triabodies, tetrabodies, and domain antibodies. Other examples are provided in Lunde et al., 2002, Biochem. Soc. Trans. 30:500-06.

[0176] Single chain antibodies (scFv) may be formed by linking heavy and light chain variable domain (Fv region) fragments via an amino acid bridge (short peptide linker, e.g., a synthetic sequence of amino acid residues), resulting in a single polypeptide chain. Such single-chain Fvs (scFvs) have been prepared by fusing DNA encoding a peptide linker between DNAs encoding the two variable domain polypeptides (V_{L} and V_{H}). The resulting polypeptides can fold back on themselves to form antigen-binding monomers, or they can form multimers (e.g., dimers, trimers, or tetramers), depending on the length of a flexible linker between the two variable domains (Kortt et al., 1997, Prot. Eng. 10:423; Kortt et al., 2001, Biomol. Eng. 18:95-108, Bird et al., 1988, Science 242:423-26 and Huston et al., 1988, Proc. Natl. Acad. Sci. USA 85:5879-83). By combining different V_{L} and V_{H}-comprising polypeptides, one can form multimeric scFvs that bind to different epitopes (Kriangkum et al., 2001, Biomol. Eng. 18:31-40). Techniques developed for the production of single chain antibodies include those described in U.S. Pat. No. 4,946,778; Bird, 1988, Science 242:423; Huston et al., 1988, Proc. Natl. Acad. Sci. USA 85:5879; Ward et al., 1989, Nature 334:544, de Graaf et al., 2002, Methods Mol Biol. 178:379-87. ScFvs comprising the variable domain combinations L1H1, L2H2, L3H3, L4H4, L5H5, L6H6, . . . , and L28H28 are encompassed by the present disclosure.

### 7.7. Monoclonal Antibody

[0177] In another aspect, the present disclosure provides monoclonal antibodies that bind to PD-1. Monoclonal antibodies of the present disclosure may be generated using a variety of known techniques. In general, monoclonal antibodies that bind to specific antigens may be obtained by methods known to those skilled in the art (see, for example, Kohler et al., Nature 256:495, 1975; Coligan et al. (eds.), Current Protocols in Immunology, 1:2.5.12.6.7 (John Wiley & Sons 1991); U.S. Pat. Nos. RE 32,011, 4,902,614, 4,543,439, and 4,411,993; Monoclonal Antibodies, Hybridomas: A New Dimension in Biological Analyses, Plenum Press, Kennett, McKearn, and Bechtol (eds.) (1980); and Antibodies: A Laboratory Manual, Harlow and Lane (eds.), Cold Spring Harbor Laboratory Press (1988); Picksley et al., “Production of monoclonal antibodies against proteins expressed in E. coli,” in DNA Cloning 2: Expression Systems, 2nd Edition, Glover et al. (eds.), page 93 (Oxford University Press 1995)). Antibody fragments may be derived therefrom using any suitable standard technique such as proteolytic digestion, or optionally, by proteolytic digestion (for example, using papain or pepsin) followed by mild reduction of disulfide bonds and alkylation. Alternatively, such fragments may also be generated by recombinant genetic engineering techniques as described herein.

[0178] Monoclonal antibodies can be obtained by injecting an animal, for example, a rat, hamster, a rabbit, or preferably a mouse, including for example a transgenic or a knock-out, as known in the art, with an immunogen comprising human PD-1 [sequence SEQ ID 7001] or a fragment thereof, according to methods known in the art and described herein. The presence of specific antibody production may be monitored after the initial injection and/or after a booster injection by obtaining a serum sample and detecting the presence of an antibody that binds to human PD-1 or peptide using any one of several immunodetection methods known in the art and described herein. From animals producing the desired antibodies, lymphoid cells, most commonly cells from the spleen or lymph node, are removed to obtain B-lymphocytes. The B lymphocytes are then fused with a drug-sensitized myeloma cell fusion partner, preferably one that is syngeneic with the immunized animal and that optionally has other desirable properties (e.g., inability to express endogenous Ig gene products, e.g., P3X63-Ag 8.653 (ATCC No. CRL 1580); NSO, SP20) to produce hybridomas, which are immortal eukaryotic cell lines.

[0179] The lymphoid (e.g., spleen) cells and the myeloma cells may be combined for a few minutes with a membrane fusion-promoting agent, such as polyethylene glycol or a nonionic detergent, and then plated at low density on a selective medium that supports the growth of hybridoma cells but not unfused myeloma cells. A preferred selection media is HAT (hypoxanthine, aminopterin, thymidine). After a sufficient time, usually about one to two weeks, colonies of cells are observed. Single colonies are isolated, and antibodies produced by the cells may be tested for binding activity to human PD-1, using any one of a variety of immunoassays known in the art and described herein. The hybridomas are cloned (e.g., by limited dilution cloning or by soft agar plaque isolation) and positive clones that produce an antibody specific to PD-1 are selected and cultured. The monoclonal antibodies from the hybridoma cultures may be isolated from the supernatants of hybridoma cultures.

[0180] An alternative method for production of a murine monoclonal antibody is to inject the hybridoma cells into the peritoneal cavity of a syngeneic mouse, for example, a mouse that has been treated (e.g., pristane-primed) to promote formation of ascites fluid containing the monoclonal antibody. Monoclonal antibodies can be isolated and purified by a variety of well-established techniques. Such isolation techniques include affinity chromatography with Protein-A Sepharose, size-exclusion chromatography, and ion-exchange chromatography (see, for example, Coligan at pages 2.7.1-2.7.12 and pages 2.9.1-2.9.3; Baines et al., “Purification of Immunoglobulin G (IgG),” in Methods in Molecular Biology, Vol. 10, pages 79-104 (The Humana Press, Inc. 1992)). Monoclonal antibodies may be purified by affinity chromatography using an appropriate ligand selected based on particular properties of the antibody (e.g., heavy or light chain isotype, binding specificity, etc.). Examples of a suitable ligand, immobilized on a solid support, include Protein A, Protein G, an anticonstant region (light chain or heavy chain) antibody, an anti-idiotype antibody, and a TGF-beta binding protein, or fragment or variant thereof.

[0181] Monoclonal antibodies may be produced using any technique known in the art, e.g., by immortalizing spleen cells harvested from the transgenic animal after completion of the immunization schedule. The spleen cells can be immortalized using any technique known in the art, e.g., by fusing them with myeloma cells to produce hybridomas. Hybridoma cell lines are identified that produce an antibody that binds a PD-1 polypeptide. Such hybridoma cell lines, and anti-PD-1 monoclonal antibodies produced by them, are encompassed by the present disclosure. Myeloma cells for use in hybridoma-producing fusion procedures preferably are non-antibody-producing, have high fusion efficiency, and enzyme deficiencies that render them incapable of growing in certain selective media which support the growth of only the desired fused cells (hybridomas). Examples of suitable cell lines for use in mouse fusions include Sp-20, P3-X63/Ag8, P3-X63-Ag8.653, NS1/1.Ag 4 1, Sp210-Ag14, FO, NSO/U, MPC-11, MPC11-X45-GTG 1.7 and S194/5XXO Bul; examples of cell lines used in rat fusions include R210.RCY3, Y3-Ag 1.2.3, IR983F and 4B210. Other cell lines useful for cell fusions are U-266, GM1500-GRG2, LICR-LON-HMy2 and UC729-6. Hybridomas or mAbs may be further screened to identify mAbs with particular properties, such as the ability to block a PD-1-induced activity.

[0182] An antibody of the present disclosure may also be a fully human monoclonal antibody. An isolated fully human antibody is provided that specifically binds to the PD-1, wherein the antigen binding protein possesses at least one in vivo biological activity of a human anti-PD-1 antibody.

### 7.8. Method of Generating Antibodies

[0183] Fully human monoclonal antibodies may be generated by any number of techniques with which those having ordinary skill in the art will be familiar. Such methods include, but are not limited to, Epstein Barr Virus (EBV) transformation of human peripheral blood cells (e.g., containing B lymphocytes), in vitro immunization of human B-cells, fusion of spleen cells from immunized transgenic mice carrying inserted human immunoglobulin genes, isolation from human immunoglobulin V region phage libraries, or other procedures as known in the art and based on the disclosure herein. For example, fully human monoclonal antibodies may be obtained from transgenic mice that have been engineered to produce specific human antibodies in response to antigenic challenge. Methods for obtaining fully human antibodies from transgenic mice are described, for example, by Green et al., Nature Genet. 7:13, 1994; Lonberg et al., Nature 368:856, 1994; Taylor et al., Int. Immun. 6:579, 1994; U.S. Pat. No. 5,877,397; Bruggemann et al., 1997 Curr. Opin. Biotechnol. 8:455-58; Jakobovits et al., 1995 Ann. N.Y. Acad. Sci. 764:525-35. In this technique, elements of the human heavy and light chain locus are introduced into strains of mice derived from embryonic stem cell lines that contain targeted disruptions of the endogenous heavy chain and light chain loci (see also Bruggemann et al., Curr. Opin. Biotechnol. 8:455-58 (1997)). For example, human immunoglobulin transgenes may be mini-gene constructs, or transloci on yeast artificial chromosomes, which undergo B-cell-specific DNA rearrangement and hypermutation in the mouse lymphoid tissue. Fully human monoclonal antibodies may be obtained by immunizing the transgenic mice, which may then produce human antibodies specific for PD-1. Lymphoid cells of the immunized transgenic mice can be used to produce human antibody-secreting hybridomas according to the methods described herein. Polyclonal sera containing fully human antibodies may also be obtained from the blood of the immunized animals.

[0184] Another method for generating human antibodies of the present disclosure includes immortalizing human peripheral blood cells by EBV transformation. See, e.g., U.S. Pat. No. 4,464,456. Such an immortalized B-cell line (or lymphoblastoid cell line) producing a monoclonal antibody that specifically binds to PD-1 can be identified by immunodetection methods as provided herein, for example, an ELISA, and then isolated by standard cloning techniques. The stability of the lymphoblastoid cell line producing an anti-PD-1 antibody may be improved by fusing the transformed cell line with a murine myeloma to produce a mouse-human hybrid cell line according to methods known in the art (see, e.g., Glasky et al., Hybridoma 8:377-89 (1989)). Still another method to generate human monoclonal antibodies is in vitro immunization, which includes priming human splenic B-cells with human PD-1, followed by fusion of primed with a heterohybrid fusion partner. See, e.g., Boerner et al., 1991 J. Immunol. 147:86-95.

[0185] In certain embodiments, a B-cell that is producing an anti-human PD-1 antibody is selected and the light chain and heavy chain variable regions are cloned from the B-cell according to molecular biology techniques known in the art (WO 92/02551; U.S. Pat. No. 5,627,052; Babcook et al., Proc. Natl. Acad. Sci. USA 93:7843-48 (1996)) and described herein. B-cells from an immunized animal may be isolated from the spleen, lymph node, or peripheral blood sample by selecting a cell that is producing an antibody that specifically binds to PD-1. B-cells may also be isolated from humans, for example, from a peripheral blood sample.

[0186] Methods for detecting single B-cells that are producing an antibody with the desired specificity are well known in the art, for example, by plaque formation, fluorescence-activated cell sorting, in vitro stimulation followed by detection of specific antibody, and the like. Methods for selection of specific antibody-producing B-cells include, for example, preparing a single cell suspension of B-cells in soft agar that contains human PD-1. Binding of the specific antibody produced by the B-cell to the antigen results in the formation of a complex, which may be visible as an immunoprecipitate.

[0187] In some embodiments, specific antibody-producing B-cells are selected by using a method that allows identification natively paired antibodies. For example, a method described in Adler et al., A natively paired antibody library yields drug leads with higher sensitivity and specificity than a randomly paired antibody library, MAbs (2018), which is incorporated by reference in its entirety herein, can be employed. The method combines microfluidic technology, molecular genomics, yeast single-chain variable fragment (scFv) display, fluorescence-activated cell sorting (FACS) and deep sequencing as summarized in FIG. 1 adopted from Adler et al. In short, B cells can be isolated from immunized animals and then pooled. The B cells are encapsulated into droplets with oligo-dT beads and a lysis solution, and mRNA-bound beads are purified from the droplets, and then injected into a second emulsion with an OE-RT-PCR amplification mix that generates DNA amplicons that encode scFv with native pairing of heavy and light chain Ig. Libraries of natively paired amplicons are then electroporated into yeast for scFv display. FACS is used to identify high affinity scFv. Finally, deep antibody sequencing can be used to identify all clones in the pre- and post-sort scFv libraries.

[0188] After the B-cells producing the desired antibody are selected, the specific antibody genes may be cloned by isolating and amplifying DNA or mRNA according to methods known in the art and described herein.

[0189] The methods for obtaining antibodies of the present disclosure can also adopt various phage display technologies known in the art. See, e.g., Winter et al., 1994 Annu. Rev. Immunol. 12:433-55; Burton et al., 1994 Adv. Immunol. 57:191-280. Human or murine immunoglobulin variable region gene combinatorial libraries may be created in phage vectors that can be screened to select Ig fragments (Fab, Fv, sFv, or multimers thereof) that bind specifically to PD-1 binding protein or variant or fragment thereof. See, e.g., U.S. Pat. No. 5,223,409; Huse et al., 1989 Science 246:1275-81; Sastry et al., Proc. Natl. Acad. Sci. USA 86:5728-32 (1989); Alting-Mees et al., Strategies in Molecular Biology 3:1-9 (1990); Kang et al., 1991 Proc. Natl. Acad. Sci. USA 88:4363-66; Hoogenboom et al., 19921 Molec. Biol. 227:381-388; Schlebusch et al., 1997 Hybridoma 16:47-52 and references cited therein. For example, a library containing a plurality of polynucleotide sequences encoding Ig variable region fragments may be inserted into the genome of a filamentous bacteriophage, such as M13 or a variant thereof, in frame with the sequence encoding a phage coat protein. A fusion protein may be a fusion of the coat protein with the light chain variable region domain and/or with the heavy chain variable region domain. According to certain embodiments, immunoglobulin Fab fragments may also be displayed on a phage particle (see, e.g., U.S. Pat. No. 5,698,426).

[0190] Antibody fragments fused to another protein, such as a minor coat protein, can be also used to enrich phage with antigen. Then, using a random combinatorial library of rearranged heavy (V_{H}) and light (V_{L}) chains from mice immune to the antigen (e.g. PD-1), diverse libraries of antibody fragments are displayed on the surface of the phage. These libraries can be screened for complementary variable domains, and the domains purified by, for example, affinity column. See Clackson et al., Nature, V. 352 pp. 624-628 (1991).

[0191] Heavy and light chain immunoglobulin cDNA expression libraries may also be prepared in lambda phage, for example, using λlmmunoZap™(H) and λImmunoZap™(L) vectors (Stratagene, La Jolla, Calif.). Briefly, mRNA is isolated from a B-cell population, and used to create heavy and light chain immunoglobulin cDNA expression libraries in the λImmunoZap(H) and λImmunoZap(L) vectors. These vectors may be screened individually or co-expressed to form Fab fragments or antibodies (see Huse et al., supra; see also Sastry et al., supra). Positive plaques may subsequently be converted to a non-lytic plasmid that allows high level expression of monoclonal antibody fragments from E. coli.

[0192] In one embodiment, in a hybridoma the variable regions of a gene expressing a monoclonal antibody of interest are amplified using nucleotide primers. These primers may be synthesized by one of ordinary skill in the art, or may be purchased from commercially available sources. (See, e.g., Stratagene (La Jolla, Calif.), which sells primers for mouse and human variable regions including, among others, primers for V_{Ha}, V_{Hb}, V_{Hc}, V_{Hd}, C_{H1}, V_{L} and C_{L} regions.) These primers may be used to amplify heavy or light chain variable regions, which may then be inserted into vectors such as ImmunoZAP™H or ImmunoZAP™L (Stratagene), respectively. These vectors may then be introduced into E. coli, yeast, or mammalian-based systems for expression. Large amounts of a single-chain protein containing a fusion of the V_{H} and V_{L} domains may be produced using these methods (see Bird et al., Science 242:423-426, 1988).

[0193] Once cells producing antibodies according to the disclosure have been obtained using any of the above-described immunization and other techniques, the specific antibody genes may be cloned by isolating and amplifying DNA or mRNA therefrom according to standard procedures as described herein. The antibodies produced therefrom may be sequenced and the CDRs identified and the DNA coding for the CDRs may be manipulated as described previously to generate other antibodies according to the present disclosure.

[0194] PD-1 binding agents of the present disclosure preferably modulate PD-1 function in the cell-based assay described herein and/or the in vivo assay described herein and/or bind to one or more of the domains described herein and/or cross-block the binding of one of the antibodies described in this application and/or are cross-blocked from binding PD-1 by one of the antibodies described in this application. Accordingly such binding agents can be identified using the assays described herein.

[0195] In certain embodiments, antibodies are generated by first identifying antibodies that bind to one or more of the domains provided herein and/or neutralize in the cell-based and/or in vivo assays described herein and/or cross-block the antibodies described in this application and/or are cross-blocked from binding PD-1 by one of the antibodies described in this application. The CDR regions from these antibodies are then used to insert into appropriate biocompatible frameworks to generate PD-1 binding agents. The non-CDR portion of the binding agent may be composed of amino acids, or may be a non-protein molecule. The assays described herein allow the characterization of binding agents. Preferably the binding agents of the present disclosure are antibodies as defined herein.

[0196] Other antibodies according to the present disclosure may be obtained by conventional immunization and cell fusion procedures as described herein and known in the art.

[0197] Molecular evolution of the complementarity determining regions (CDRs) in the center of the antibody binding site also has been used to isolate antibodies with increased affinity, for example, antibodies having increased affinity for c-erbB-2, as described by Schier et al., 1996, J. Mol. Biol. 263:551. Accordingly, such techniques are useful in preparing antibodies to PD-1. Antigen binding proteins directed against a PD-1 can be used, for example, in assays to detect the presence of PD-1 polypeptides, either in vitro or in vivo. The antigen binding proteins also may be employed in purifying PD-1 proteins by immunoaffinity chromatography.

[0198] Although human, partially human, or humanized antibodies will be suitable for many applications, particularly those involving administration of the antibody to a human subject, other types of antigen binding proteins will be suitable for certain applications. Non-human antibodies can be derived from any antibody-producing animal, such as mouse, rat, rabbit, goat, donkey, or non-human primate (such as monkey (e.g., cynomolgus or rhesus monkey) or ape (e.g., chimpanzee)). An antibody from a particular species can be made by, for example, immunizing an animal of that species with the desired immunogen (e.g., a PD-1 polypeptide) or using an artificial system for generating antibodies of that species (e.g., a bacterial or phage display-based system for generating antibodies of a particular species), or by converting an antibody from one species into an antibody from another species by replacing, e.g., the constant region of the antibody with a constant region from the other species, or by replacing one or more amino acid residues of the antibody so that it more closely resembles the sequence of an antibody from the other species. In one embodiment, the antibody is a chimeric antibody comprising amino acid sequences derived from antibodies from two or more different species.

[0199] Antigen binding proteins may be prepared, and screened for desired properties, by any of a number of conventional techniques. Certain of the techniques involve isolating a nucleic acid encoding a polypeptide chain (or portion thereof) of an antigen binding protein of interest (e.g., an anti-PD-1 antibody), and manipulating the nucleic acid through recombinant DNA technology. The nucleic acid may be fused to another nucleic acid of interest, or altered (e.g., by mutagenesis or other conventional techniques) to add, delete, or substitute one or more amino acid residues, for example. Furthermore, the antigen binding proteins may be purified from cells that naturally express them (e.g., an antibody can be purified from a hybridoma that produces it), or produced in recombinant expression systems, using any technique known in the art. See, for example, Monoclonal Antibodies, Hybridomas: A New Dimension in Biological Analyses, Kennet et al. (eds.), Plenum Press, New York (1980); and Antibodies: A Laboratory Manual, Harlow and Land (eds.), Cold Spring Harbor Laboratory Press, Cold Spring Harbor, N.Y., (1988).

[0200] Any expression system known in the art can be used to make the recombinant polypeptides of the present disclosure. Expression systems are detailed comprehensively above. In general, host cells are transformed with a recombinant expression vector that comprises DNA encoding a desired polypeptide. Among the host cells that may be employed are prokaryotes, yeast or higher eukaryotic cells. Prokaryotes include gram negative or gram positive organisms, for example E. coli or Bacilli. Higher eukaryotic cells include insect cells and established cell lines of mammalian origin. Examples of suitable mammalian host cell lines include the COS-7 line of monkey kidney cells (ATCC CRL 1651) (Gluzman et al., 1981, Cell 23:175), L cells, 293 cells, C127 cells, 3T3 cells (ATCC CCL 163), Chinese hamster ovary (CHO) cells, HeLa cells, BHK (ATCC CRL 10) cell lines, and the CVI/EBNA cell line derived from the African green monkey kidney cell line CVI (ATCC CCL 70) as described by McMahan et al., 1991, EMBO J. 10: 2821. Appropriate cloning and expression vectors for use with bacterial, fungal, yeast, and mammalian cellular hosts are described by Pouwels et al. (Cloning Vectors: A Laboratory Manual, Elsevier, New York, 1985).

[0201] It will be appreciated that an antibody of the present disclosure may have at least one amino acid substitution, providing that the antibody retains binding specificity. Therefore, modifications to the antibody structures are encompassed within the scope of the present disclosure. These may include amino acid substitutions, which may be conservative or non-conservative that do not destroy the PD-1 binding capability of an antibody. Conservative amino acid substitutions may encompass non-naturally occurring amino acid residues, which are typically incorporated by chemical peptide synthesis rather than by synthesis in biological systems. These include peptidomimetics and other reversed or inverted forms of amino acid moieties. A conservative amino acid substitution may also involve a substitution of a native amino acid residue with a normative residue such that there is little or no effect on the polarity or charge of the amino acid residue at that position.

[0202] Non-conservative substitutions may involve the exchange of a member of one class of amino acids or amino acid mimetics for a member from another class with different physical properties (e.g. size, polarity, hydrophobicity, charge). Such substituted residues may be introduced into regions of the human antibody that are homologous with non-human antibodies, or into the non-homologous regions of the molecule.

[0203] Moreover, one skilled in the art may generate test variants containing a single amino acid substitution at each desired amino acid residue. The variants can then be screened using activity assays known to those skilled in the art. Such variants could be used to gather information about suitable variants. For example, if one discovered that a change to a particular amino acid residue resulted in destroyed, undesirably reduced, or unsuitable activity, variants with such a change may be avoided. In other words, based on information gathered from such routine experiments, one skilled in the art can readily determine the amino acids where further substitutions should be avoided either alone or in combination with other mutations.

[0204] A skilled artisan will be able to determine suitable variants of the polypeptide as set forth herein using well-known techniques. In certain embodiments, one skilled in the art may identify suitable areas of the molecule that may be changed without destroying activity by targeting regions not believed to be important for activity. In certain embodiments, one can identify residues and portions of the molecules that are conserved among similar polypeptides. In certain embodiments, even areas that may be important for biological activity or for structure may be subject to conservative amino acid substitutions without destroying the biological activity or without adversely affecting the polypeptide structure.

[0205] Additionally, one skilled in the art can review structure-function studies identifying residues in similar polypeptides that are important for activity or structure. In view of such a comparison, one can predict the importance of amino acid residues in a protein that correspond to amino acid residues which are important for activity or structure in similar proteins. One skilled in the art may opt for chemically similar amino acid substitutions for such predicted important amino acid residues.

[0206] One skilled in the art can also analyze the three-dimensional structure and amino acid sequence in relation to that structure in similar polypeptides. In view of such information, one skilled in the art may predict the alignment of amino acid residues of an antibody with respect to its three dimensional structure. In certain embodiments, one skilled in the art may choose not to make radical changes to amino acid residues predicted to be on the surface of the protein, since such residues may be involved in important interactions with other molecules.

[0207] A number of scientific publications have been devoted to the prediction of secondary structure. See Moult J., Curr. Op. in Biotech., 7(4):422-427 (1996), Chou et al., Biochem., 13(2):222-245 (1974); Chou et al., Biochem., 113(2):211-222 (1974); Chou et al., Adv. Enzymol. Relat. Areas Mol. Biol., 47:45-148 (1978); Chou et al., Ann. Rev. Biochem., 47:251-276 and Chou et al., Biophys. J., 26:367-384 (1979). Moreover, computer programs are currently available to assist with predicting secondary structure. One method of predicting secondary structure is based upon homology modeling. For example, two polypeptides or proteins which have a sequence identity of greater than 30%, or similarity greater than 40% often have similar structural topologies. The recent growth of the protein structural database (PDB) has provided enhanced predictability of secondary structure, including the potential number of folds within a polypeptide's or protein's structure. See Holm et al., Nucl. Acid. Res., 27(1):244-247 (1999). It has been suggested (Brenner et al., Curr. Op. Struct. Biol., 7(3):369-376 (1997)) that there are a limited number of folds in a given polypeptide or protein and that once a critical number of structures have been resolved, structural prediction will become dramatically more accurate.

[0208] Additional methods of predicting secondary structure include “threading” (Jones, D., Curr. Opin. Struct. Biol., 7(3):377-87 (1997); Sippl et al., Structure, 4(1):15-19 (1996)), “profile analysis” (Bowie et al., Science, 253:164-170 (1991); Gribskov et al., Meth. Enzym., 183:146-159 (1990); Gribskov et al., Proc. Nat. Acad. Sci., 84(13):4355-4358 (1987)), and “evolutionary linkage” (See Holm, supra (1999), and Brenner, supra (1997)).

[0209] In certain embodiments, variants of antibodies include glycosylation variants wherein the number and/or type of glycosylation site has been altered compared to the amino acid sequences of a parent polypeptide. In certain embodiments, variants comprise a greater or a lesser number of N-linked glycosylation sites than the native protein. An N-linked glycosylation site is characterized by the sequence: Asn-X-Ser or Asn-X-Thr, wherein the amino acid residue designated as X can be any amino acid residue except proline. The substitution of amino acid residues to create this sequence provides a potential new site for the addition of an N-linked carbohydrate chain. Alternatively, substitutions which eliminate this sequence will remove an existing N-linked carbohydrate chain. Also provided is a rearrangement of N-linked carbohydrate chains wherein one or more N-linked glycosylation sites (typically those that are naturally occurring) are eliminated and one or more new N-linked sites are created. Additional preferred antibody variants include cysteine variants wherein one or more cysteine residues are deleted from or substituted for another amino acid (e.g., serine) as compared to the parent amino acid sequence. Cysteine variants can be useful when antibodies must be refolded into a biologically active conformation such as after the isolation of insoluble inclusion bodies. Cysteine variants generally have fewer cysteine residues than the native protein, and typically have an even number to minimize interactions resulting from unpaired cysteines.

[0210] Desired amino acid substitutions (whether conservative or non-conservative) can be determined by those skilled in the art at the time such substitutions are desired. In certain embodiments, amino acid substitutions can be used to identify important residues of antibodies to PD-1, or to increase or decrease the affinity of the antibodies to PD-1 described herein.

[0211] According to certain embodiments, preferred amino acid substitutions are those which: (1) reduce susceptibility to proteolysis, (2) reduce susceptibility to oxidation, (3) alter binding affinity for forming protein complexes, (4) alter binding affinities, and/or (4) confer or modify other physiochemical or functional properties on such polypeptides. According to certain embodiments, single or multiple amino acid substitutions (in certain embodiments, conservative amino acid substitutions) may be made in the naturally-occurring sequence (in certain embodiments, in the portion of the polypeptide outside the domain(s) forming intermolecular contacts). In certain embodiments, a conservative amino acid substitution typically may not substantially change the structural characteristics of the parent sequence (e.g., a replacement amino acid should not tend to break a helix that occurs in the parent sequence, or disrupt other types of secondary structure that characterizes the parent sequence). Examples of art-recognized polypeptide secondary and tertiary structures are described in Proteins, Structures and Molecular Principles (Creighton, Ed., W. H. Freeman and Company, New York (1984)); Introduction to Protein Structure (C. Branden and J. Tooze, eds., Garland Publishing, New York, N.Y. (1991)); and Thornton et al. Nature 354:105 (1991), which are each incorporated herein by reference.

[0212] In certain embodiments, antibodies of the present disclosure may be chemically bonded with polymers, lipids, or other moieties.

[0213] The binding agents may comprise at least one of the CDRs described herein incorporated into a biocompatible framework structure. In one example, the biocompatible framework structure comprises a polypeptide or portion thereof that is sufficient to form a conformationally stable structural support, or framework, or scaffold, which is able to display one or more sequences of amino acids that bind to an antigen (e.g., CDRs, a variable region, etc.) in a localized surface region. Such structures can be a naturally occurring polypeptide or polypeptide “fold” (a structural motif), or can have one or more modifications, such as additions, deletions or substitutions of amino acids, relative to a naturally occurring polypeptide or fold. These scaffolds can be derived from a polypeptide of any species (or of more than one species), such as a human, other mammal, other vertebrate, invertebrate, plant, bacteria or virus.

[0214] Typically the biocompatible framework structures are based on protein scaffolds or skeletons other than immunoglobulin domains. For example, those based on fibronectin, ankyrin, lipocalin, neocarzinostain, cytochrome b, CP1 zinc finger, PST1, coiled coil, LACI-D1, Z domain and tendamistat domains may be used (See e.g., Nygren and Uhlen, 1997, Curr. Opin. in Struct. Biol., 7, 463-469).

[0215] Humanized antibodies such as those described herein can be produced using techniques known to those skilled in the art (Zhang, W., et al., Molecular Immunology. 42(12):1445-1451, 2005; Hwang W. et al., Methods. 36(1):35-42, 2005; Dall'Acqua W F, et al., Methods 36(1):43-60, 2005; and Clark, M., Immunology Today. 21(8):397-402, 2000).

[0216] Additionally, one skilled in the art will recognize that suitable binding agents include portions of these antibodies, such as one or more of CDR1-L1 to 11 with SEQ ID NOS 1001-1011; CDR2-L1 to 11 with SEQ ID NOS 2001-2011; CDR3-L1 to 11 with SEQ ID NOS 3001-3011; CDR1-H1 to 11 with SEQ ID NOS 4001-4011; CDR2-H1 to 11 with SEQ ID NOS 5001-5011; and CDR3-H1 to 11 with SEQ ID NOS 6001-6011, as specifically disclosed herein. At least one of the regions of CDR regions may have at least one amino acid substitution from the sequences provided here, provided that the antibody retains the binding specificity of the non-substituted CDR. The non-CDR portion of the antibody may be a non-protein molecule, wherein the binding agent cross-blocks the binding of an antibody disclosed herein to PD-1 and/or neutralizes PD-1. The non-CDR portion of the antibody may be a non-protein molecule in which the antibody exhibits a similar binding pattern to human PD-1 peptides in a competition binding assay as that exhibited by at least one of antibodies A1-A28, and/or neutralizes PD-1. The non-CDR portion of the antibody may be composed of amino acids, wherein the antibody is a recombinant binding protein or a synthetic peptide, and the recombinant binding protein cross-blocks the binding of an antibody disclosed herein to PD-1 and/or neutralizes PD-1. The non-CDR portion of the antibody may be composed of amino acids, wherein the antibody is a recombinant antibody, and the recombinant antibody exhibits a similar binding pattern to human PD-1 peptides in the human PD-1 peptide epitope competition binding assay (described hereinbelow) as that exhibited by at least one of the antibodies A1-A28, and/or neutralizes PD-1.

[0217] Where an antibody comprises one or more of CDR1-H, CDR2-H, CDR3-H, CDR1-L, CDR2-L and CDR3-L as described above, it may be obtained by expression from a host cell containing DNA coding for these sequences. A DNA coding for each CDR sequence may be determined on the basis of the amino acid sequence of the CDR and synthesized together with any desired antibody variable region framework and constant region DNA sequences using oligonucleotide synthesis techniques, site-directed mutagenesis and polymerase chain reaction (PCR) techniques as appropriate. DNA coding for variable region frameworks and constant regions is widely available to those skilled in the art from genetic sequences databases such as GenBank®.

[0218] Once synthesized, the DNA encoding an antibody of the present disclosure or fragment thereof may be propagated and expressed according to any of a variety of well-known procedures for nucleic acid excision, ligation, transformation, and transfection using any number of known expression vectors. Thus, in certain embodiments expression of an antibody fragment may be preferred in a prokaryotic host, such as Escherichia coli (see, e.g., Pluckthun et al., 1989 Methods Enzymol. 178:497-515). In certain other embodiments, expression of the antibody or a fragment thereof may be preferred in a eukaryotic host cell, including yeast (e.g., Saccharomyces cerevisiae, Schizosaccharomyces pombe, and Pichia pastoris), animal cells (including mammalian cells) or plant cells. Examples of suitable animal cells include, but are not limited to, myeloma (such as a mouse NSO line), COS, CHO, or hybridoma cells. Examples of plant cells include tobacco, corn, soybean, and rice cells.

[0219] One or more replicable expression vectors containing DNA encoding an antibody variable and/or constant region may be prepared and used to transform an appropriate cell line, for example, a non-producing myeloma cell line, such as a mouse NSO line or a bacteria, such as E. coli, in which production of the antibody will occur. In order to obtain efficient transcription and translation, the DNA sequence in each vector should include appropriate regulatory sequences, particularly a promoter and leader sequence operatively linked to the variable domain sequence. Particular methods for producing antibodies in this way are generally well-known and routinely used. For example, basic molecular biology procedures are described by Maniatis et al. (Molecular Cloning, A Laboratory Manual, 2nd ed., Cold Spring Harbor Laboratory, New York, 1989; see also Maniatis et al, 3rd ed., Cold Spring Harbor Laboratory, New York, (2001)). DNA sequencing can be performed as described in Sanger et al. (PNAS 74:5463, (1977)) and the Amersham International plc sequencing handbook, and site directed mutagenesis can be carried out according to methods known in the art (Kramer et al., Nucleic Acids Res. 12:9441, (1984); Kunkel Proc. Natl. Acad. Sci. USA 82:488-92 (1985); Kunkel et al., Methods in Enzymol. 154:367-82 (1987); the Anglian Biotechnology Ltd. handbook). Additionally, numerous publications describe techniques suitable for the preparation of antibodies by manipulation of DNA, creation of expression vectors, and transformation and culture of appropriate cells (Mountain A and Adair, J R in Biotechnology and Genetic Engineering Reviews (ed. Tombs, M P, 10, Chapter 1, 1992, Intercept, Andover, UK); “Current Protocols in Molecular Biology”, 1999, F.M. Ausubel (ed.), Wiley Interscience, New York).

[0220] Where it is desired to improve the affinity of antibodies according to the present disclosure containing one or more of the above-mentioned CDRs can be obtained by a number of affinity maturation protocols including maintaining the CDRs (Yang et al., J. Mol. Biol., 254, 392-403, 1995), chain shuffling (Marks et al., Bio/Technology, 10, 779-783, 1992), use of mutation strains of E. coli. (Low et al., J. Mol. Biol., 250, 350-368, 1996), DNA shuffling (Patten et al., Curr. Opin. Biotechnol., 8, 724-733, 1997), phage display (Thompson et al., J. Mol. Biol., 256, 7-88, 1996) and sexual PCR (Crameri, et al., Nature, 391, 288-291, 1998). All of these methods of affinity maturation are discussed by Vaughan et al. (Nature Biotech., 16, 535-539, 1998).

[0221] It will be understood by one skilled in the art that some proteins, such as antibodies, may undergo a variety of posttranslational modifications. The type and extent of these modifications often depends on the host cell line used to express the protein as well as the culture conditions. Such modifications may include variations in glycosylation, methionine oxidation, diketopiperizine formation, aspartate isomerization and asparagine deamidation. A frequent modification is the loss of a carboxy-terminal basic residue (such as lysine or arginine) due to the action of carboxypeptidases (as described in Harris, R. J. Journal of Chromatography 705:129-134, 1995).

### 7.9. Sequences

[0222] Antibodies A1-A28 comprise heavy and light chain V(J)D polynucleotides (also referred to herein as L1-L28 and H1-H28, respectively). Antibodies A1-A28 comprise the sequences listed in TABLE 5. For example, antibody Al comprises light chain L1 (SEQ ID NO:1) and heavy chain H1 (SEQ ID NO:101). CDR sequences in the light chain (L1-L28) and heavy chain (H1-H28) are also provided with a specific SEQ ID NOs. For example, three CDR sequences (CDR1, CDR 2 and CDR3) for L1 are CDR1-L1 (SEQ ID NO:1001), CDR2-L1 (SEQ ID NO:2001) and CDR3-L1 (SEQ ID NO:3001), respectively and three CDR sequences (CDR1, CDR2 and CDR3) for H1 are CDR1-H1 (SEQ ID NO:4001), CDR2-H1 (SEQ ID NO:5001) and CDR3-H1 (SEQ ID NO:6001).

TABLE 5

| Antibodies | Light Chain | Heavy Chain |
|---|---|---|
| A1 | L1 (SEQ ID NO: 1) | H1 (SEQ ID NO: 101) |
| | L1 comprises CDR1-L1 (SEQ ID NO: 1001), | H1 comprises CDR1-H1 (SEQ ID NO: |
| | CDR2-L1 (SEQ ID NO: 2001) and CDR3-L1 | 4001), CDR2-H1 (SEQ ID NO: 5001) and |
| | (SEQ ID NO: 3001) | CDR3-H1 (SEQ ID NO: 6001) |
| A2 | L2 (SEQ ID NO: 2) | H2 (SEQ ID NO: 102) |
| | L2 comprises CDR1-L2 (SEQ ID NO: 1002), | He comprises CDR1-H2 (SEQ ID NO: |
| | CDR2-L2 (SEQ ID NO: 2002) and CDR3-L2 | 4002), CDR2-H2 (SEQ ID NO: 5002) and |
| | (SEQ ID NO: 3002) | CDR3-H2 (SEQ ID NO: 6002) |
| A3 | L3 (SEQ ID NO: 3) | H3 (SEQ ID NO: 103) |
| | L3 comprises CDR1-L3 (SEQ ID NO: 1003), | H3 comprises CDR1-H3 (SEQ ID NO: 4003), |
| | CDR2-L3 (SEQ ID NO: 2003) and CDR3-L3 | CDR2-H3 (SEQ ID NO: 5003) and CDR3- |
| | (SEQ ID NO: 3003) | H3 (SEQ ID NO: 6003) |
| A4 | L4 (SEQ ID NO: 4) | H4 (SEQ ID NO: 104) |
| | L4 comprises CDR1-L4 (SEQ ID NO: 1004), | H4 comprises CDR1-H4 (SEQ ID NO: 4004), |
| | CDR2-L4 (SEQ ID NO: 2004) and CDR3-L4 | CDR2-H4 (SEQ ID NO: 5004) and CDR3- |
| | (SEQ ID NO: 3004) | H4 (SEQ ID NO: 6004) |
| A5 | L5 (SEQ ID NO: 5) | H5 (SEQ ID NO: 105) |
| | L5 comprises CDR1-L5 (SEQ ID NO: 1005), | H4 comprises CDR1-H5 (SEQ ID NO: 4005), |
| | CDR2-L5 (SEQ ID NO: 2005) and CDR3-L5 | CDR2-H5 (SEQ ID NO: 5005) and CDR3- |
| | (SEQ ID NO: 3005) | H5 (SEQ ID NO: 6005) |
| A6 | L6 (SEQ ID NO: 6) | H6 (SEQ ID NO: 106) |
| | L6 comprises CDR1-L6 (SEQ ID NO: 1006), | H6 comprises CDR1-H6 (SEQ ID NO: 4006), |
| | CDR2-L6 (SEQ ID NO: 2006) and CDR3-L6 | CDR2-H6 (SEQ ID NO: 5006) and CDR3- |
| | (SEQ ID NO: 3006) | H6 (SEQ ID NO: 6006) |
| A7 | L7 (SEQ ID NO: 7) | H7 (SEQ ID NO: 107) |
| | L7 comprises CDR1-L7 (SEQ ID NO: 1007), | H7 comprises CDR1-H7 (SEQ ID NO: 4007), |
| | CDR2-L7 (SEQ ID NO: 2007) and CDR3-L7 | CDR2-H7 (SEQ ID NO: 5007) and CDR3- |
| | (SEQ ID NO: 3007) | H7 (SEQ ID NO: 6007) |
| A8 | L8 (SEQ ID NO: 8) | H8 (SEQ ID NO: 108) |
| | L8 comprises CDR1-L8 (SEQ ID NO: 1008), | H8 comprises CDR1-H8 (SEQ ID NO: 4008), |
| | CDR2-L8 (SEQ ID NO: 2008) and CDR3-L6 | CDR2-H8 (SEQ ID NO: 5008) and CDR3- |
| | (SEQ ID NO: 3008) | H8 (SEQ ID NO: 6008) |
| A9 | L9 (SEQ ID NO: 9) | H9 (SEQ ID NO: 109) |
| | L9 comprises CDR1-L9 (SEQ ID NO: 1009), | H9 comprises CDR1-H9 (SEQ ID NO: 4009), |
| | CDR2-L9 (SEQ ID NO: 2009) and CDR3-L9 | CDR2-H9 (SEQ ID NO: 5009) and CDR3- |
| | (SEQ ID NO: 3009) | H9 (SEQ ID NO: 6009) |
| A10 | L10 (SEQ ID NO: 10) | H10 (SEQ ID NO: 110) |
| | L10 comprises CDR1-L10 (SEQ ID | H10 comprises CDR1-H10 (SEQ ID |
| | NO: 1010), CDR2-L10 (SEQ ID NO: 2010) | NO: 4010), CDR2-H10 (SEQ ID NO: 5010) |
| | and CDR3-L10 (SEQ ID NO: 3010) | and CDR3-H10 (SEQ ID NQ:6010) |
| A11 | L11 (SEQ ID NO: 11) | H11 (SEQ ID NO: 111) |
| | L11 comprises CDR1-L11 (SEQ ID | H11 comprises CDR1-H11 (SEQ ID |
| | NO: 1011), CDR2-L11 (SEQ ID NO: 2011) | NO: 4011), CDR2-H11 (SEQ ID NO: 5011) |
| | and CDR3-L11 (SEQ ID NO: 3011) | and CDR3-H11 (SEQ ID NO: 6011) |
| A12 | L12 (SEQ ID NO: 12) | H12 (SEQ ID NO: 112) |
| | L12 comprises CDR1-L12 (SEQ ID | H12 comprises CDR1-H12 (SEQ ID |
| | NO: 1012), CDR2-L12 (SEQ ID NO: 2012) | NO: 4012), CDR2-H12 (SEQ ID NO: 5012) |
| | and CDR3-L12 (SEQ ID NO: 3012) | and CDR3-H12 (SEQ ID NO: 6012) |
| A13 | L13 (SEQ ID NO: 13) | H13 (SEQ ID NO: 113) |
| | L13 comprises CDR1-L13 (SEQ ID | H13 comprises CDR1-H13 (SEQ ID |
| | NO: 1013), CDR2-L13 (SEQ ID NO: 2013) | NO: 4013), CDR2-H13 (SEQ ID NO: 5013) |
| | and CDR3-L13 (SEQ ID NO: 3013) | and CDR3-H13 (SEQ ID NO: 6013) |
| A14 | L14 (SEQ ID NO: 14) | H14 (SEQ ID NO: 114) |
| | L14 comprises CDR1-L14 (SEQ ID | H14 comprises CDR1-H14 (SEQ ID |
| | NO: 1014), CDR2-L14 (SEQ ID NO: 2014) | NO: 4014), CDR2-H14 (SEQ ID NO: 5014) |
| | and CDR3-L14 (SEQ ID NO: 3014) | and CDR3-H14 (SEQ ID NO: 6014) |
| A15 | L15 (SEQ ID NO: 15) | H15 (SEQ ID NO: 115) |
| | L15 comprises CDR1-L15 (SEQ ID | H15 comprises CDR1-H15 (SEQ ID |
| | NO: 1015), CDR2-L15 (SEQ ID NO: 2015) | NO: 4015), CDR2-H15 (SEQ ID NO: 5015) |
| | and CDR3-L15 (SEQ ID NO: 3015) | and CDR3-H15 (SEQ ID NO: 6015) |
| A16 | L16 (SEQ ID NO: 16) | H16 (SEQ ID NO: 116) |
| | L16 comprises CDR1-L16 (SEQ ID | H16 comprises CDR1-H16 (SEQ ID |
| | NO: 1016), CDR2-L16 (SEQ ID NO: 2016) | NO: 4016), CDR2-H16 (SEQ ID NO: 5016) |
| | and CDR3-L16 (SEQ ID NO: 3016) | and CDR3-H16 (SEQ ID NO: 6016) |
| A17 | L17 (SEQ ID NO: 17) | H17 (SEQ ID NO: 117) |
| | L17 comprises CDR1-L17 (SEQ ID | H17 comprises CDR1-H17 (SEQ ID |
| | NO: 1017), CDR2-L17 (SEQ ID NO: 2017) | NO: 4017), CDR2-H17 (SEQ ID NO: 5017) |
| | and CDR3-L17 (SEQ ID NO: 3017) | and CDR3-H17 (SEQ ID NO: 6017) |
| A18 | L18 (SEQ ID NO: 18) | H18 (SEQ ID NO: 118) |
| | L18 comprises CDR1-L18 (SEQ ID | H18 comprises CDR1-H18 (SEQ ID |
| | NO: 1018), CDR2-L18 (SEQ ID NO: 2018) | NO: 4018), CDR2-H18 (SEQ ID NO: 5018) |
| | and CDR3-L18 (SEQ ID NO: 3018) | and CDR3-H18 (SEQ ID NO: 6018) |
| A19 | L19 (SEQ ID NO: 19) | H19(SEQ ID NO: 119) |
| | L19 comprises CDR1-L19 (SEQ ID | H19 comprises CDR1-H19 (SEQ ID |
| | NO: 1019), CDR2-L19 (SEQ ID NO: 2019) | NO: 4019), CDR2-H19 (SEQ ID NO: 5019) |
| | and CDR3-L19 (SEQ ID NO: 3019) | and CDR3-H19 (SEQ ID NO: 6019) |
| A20 | L20 (SEQ ID NO: 20) | H20 (SEQ ID NO: 120) |
| | L20 comprises CDR1-L20 (SEQ ID | H20 comprises CDR1-H20 (SEQ ID |
| | NO: 1020), CDR2-L20 (SEQ ID NO: 2020) | NO: 4020), CDR2-H20 (SEQ ID NO: 5020) |
| | and CDR3-L20 (SEQ ID NO: 3020) | and CDR3-H20 (SEQ ID NO: 6020) |
| A21 | L21 (SEQ ID NO: 21) | H21 (SEQ ID NO: 121) |
| | L21 comprises CDR1-L21 (SEQ ID | H21 comprises CDR1-H21 (SEQ ID |
| | NO: 1021), CDR2-L21 (SEQ ID NO: 2021) | NO: 4021), CDR2-H21 (SEQ ID NO: 5021) |
| | and CDR3-L21 (SEQ ID NO: 3021) | and CDR3-H21 (SEQ ID NO: 6021) |
| A22 | L22 (SEQ ID NO: 22) | H22 (SEQ ID NO: 122) |
| | L22 comprises CDR1-L22 (SEQ ID | H22 comprises CDR1-H22 (SEQ ID |
| | NO: 1022), CDR2-L22 (SEQ ID NO: 2022) | NO: 4022), CDR2-H22 (SEQ ID NO: 5022) |
| | and CDR3-L22 (SEQ ID NO: 3022) | and CDR3-H22 (SEQ ID NO: 6022) |
| A23 | L23 (SEQ ID NO: 23) | H23 (SEQ ID NO: 123) |
| | L23 comprises CDR1-L23 (SEQ ID | H23 comprises CDR1-H23 (SEQ ID |
| | NO: 1023), CDR2-L23 (SEQ ID NO: 2023) | NO: 4023), CDR2-H23 (SEQ ID NO: 5023) |
| | and CDR3-L23 (SEQ ID NO: 3023) | and CDR3-H23 (SEQ ID NO: 6023) |
| A24 | L24 (SEQ ID NO: 24) | H24 (SEQ ID NO: 124) |
| | L24 comprises CDR1-L24 (SEQ ID | H24 comprises CDR1-H24 (SEQ ID |
| | NO: 1024), CDR2-L24 (SEQ ID NO: 2024) | NO: 4024), CDR2-H24 (SEQ ID NO: 5024) |
| | and CDR3-L24 (SEQ ID NO: 3024) | and CDR3-H24 (SEQ ID NO: 6024) |
| A25 | L25 (SEQ ID NO: 25) | H25 (SEQ ID NO: 125) |
| | L25 comprises CDR1-L25 (SEQ ID | H25 comprises CDR1-H25 (SEQ ID |
| | NO: 1025), CDR2-L25 (SEQ ID NO: 2025) | NO: 4025), CDR2-H25 (SEQ ID NO: 5025) |
| | and CDR3-L25 (SEQ ID NO: 3025) | and CDR3-H25 (SEQ ID NO: 6025) |
| A26 | L26 (SEQ ID NO: 26) | H26 (SEQ ID NO: 126) |
| | L26 comprises CDR1-L26 (SEQ ID | H26 comprises CDR1-H26 (SEQ ID |
| | NO: 1026), CDR2-L26 (SEQ ID NO: 2026) | NO: 4026), CDR2-H26 (SEQ ID NO: 5026) |
| | and CDR3-L26 (SEQ ID NO: 3026) | and CDR3-H26 (SEQ ID NO: 6026) |
| A27 | L27 (SEQ ID NO: 27) | H27 (SEQ ID NO: 127) |
| | L27 comprises CDR1-L27 (SEQ ID | H27 comprises CDR1-H27 (SEQ ID |
| | NO: 1027), CDR2-L27 (SEQ ID NO: 2027) | NO: 4027), CDR2-H27 (SEQ ID NO: 5027) |
| | and CDR3-L27 (SEQ ID NO: 3027) | and CDR3-H27 (SEQ ID NO: 6027) |
| A28 | L28 (SEQ ID NO: 28) | H28 (SEQ ID NO: 128) |
| | L28 comprises CDR1-L28 (SEQ ID | H28 comprises CDR1-H28 (SEQ ID |
| | NO: 1028), CDR2-L28 (SEQ ID NO: 2028) | NO: 4028), CDR2-H28 (SEQ ID NO: 5028) |
| | and CDR3-L28 (SEQ ID NO: 3028) | and CDR3-H28 (SEQ ID NO: 6028) |

### 7.10. Pharmaceutical Compositions

[0223] Pharmaceutical compositions containing the proteins and polypeptides of the present disclosure are also provided. Such compositions comprise a therapeutically or prophylactically effective amount of the polypeptide or protein in a mixture with pharmaceutically acceptable materials, and physiologically acceptable formulation materials.

[0224] The pharmaceutical composition may contain formulation materials for modifying, maintaining or preserving, for example, the pH, osmolarity, viscosity, clarity, color, isotonicity, odor, sterility, stability, rate of dissolution or release, adsorption or penetration of the composition.

[0225] Suitable formulation materials include, but are not limited to, amino acids (such as glycine, glutamine, asparagine, arginine or lysine); antimicrobials; antioxidants (such as ascorbic acid, sodium sulfite or sodium hydrogen-sulfite); buffers (such as borate, bicarbonate, Tris-HC1, citrates, phosphates, other organic acids); bulking agents (such as mannitol or glycine), chelating agents (such as ethylenediamine tetraacetic acid (EDTA)); complexing agents (such as caffeine, polyvinylpyrrolidone, beta-cyclodextrin or hydroxypropyl-beta-cyclodextrin); fillers; monosaccharides; disaccharides and other carbohydrates (such as glucose, mannose, or dextrins); proteins (such as serum albumin, gelatin or immunoglobulins); coloring; flavoring and diluting agents; emulsifying agents; hydrophilic polymers (such as polyvinylpyrrolidone); low molecular weight polypeptides; salt-forming counterions (such as sodium); preservatives (such as benzalkonium chloride, benzoic acid, salicylic acid, thimerosal, phenethyl alcohol, methylparaben, propylparaben, chlorhexidine, sorbic acid or hydrogen peroxide); solvents (such as glycerin, propylene glycol or polyethylene glycol); sugar alcohols (such as mannitol or sorbitol); suspending agents; surfactants or wetting agents (such as pluronics, PEG, sorbitan esters, polysorbates such as polysorbate 20, polysorbate 80, triton, tromethamine, lecithin, cholesterol, tyloxapal); stability enhancing agents (sucrose or sorbitol); tonicity enhancing agents (such as alkali metal halides (preferably sodium or potassium chloride, mannitol sorbitol); delivery vehicles; diluents; excipients and/or pharmaceutical adjuvants. Neutral buffered saline or saline mixed with conspecific serum albumin are examples of appropriate diluents. In accordance with appropriate industry standards, preservatives such as benzyl alcohol may also be added. The composition may be formulated as a lyophilizate using appropriate excipient solutions (e.g., sucrose) as diluents. Suitable components are nontoxic to recipients at the dosages and concentrations employed. Further examples of components that may be employed in pharmaceutical formulations are presented in Remington's Pharmaceutical Sciences, 16^{th} Ed. (1980) and 20^{th} Ed. (2000), Mack Publishing Company, Easton, Pa.

[0226] Optionally, the composition additionally comprises one or more physiologically active agents, for example, an anti-angiogenic substance, a chemotherapeutic substance (such as capecitabine, 5-fluorouracil, or doxorubicin), an analgesic substance, etc., non-exclusive examples of which are provided herein. In various particular embodiments, the composition comprises one, two, three, four, five, or six physiologically active agents in addition to a PD-1-binding protein.

[0227] In another embodiment of the present disclosure, the compositions disclosed herein may be formulated in a neutral or salt form. Illustrative pharmaceutically-acceptable salts include the acid addition salts (formed with the free amino groups of the protein) and which are formed with inorganic acids such as, for example, hydrochloric or phosphoric acids, or such organic acids as acetic, oxalic, tartaric, mandelic, and the like. Salts formed with the free carboxyl groups can also be derived from inorganic bases such as, for example, sodium, potassium, ammonium, calcium, or ferric hydroxides, and such organic bases as isopropylamine, trimethylamine, histidine, procaine and the like. Upon formulation, solutions will be administered in a manner compatible with the dosage formulation and in such amount as is therapeutically effective.

[0228] The carriers can further comprise any and all solvents, dispersion media, vehicles, coatings, diluents, antibacterial and antifungal agents, isotonic and absorption delaying agents, buffers, carrier solutions, suspensions, colloids, and the like. The use of such media and agents for pharmaceutical active substances is well known in the art. Except insofar as any conventional media or agent is incompatible with the active ingredient, its use in the therapeutic compositions is contemplated. Supplementary active ingredients can also be incorporated into the compositions. The phrase “pharmaceutically-acceptable” refers to molecular entities and compositions that do not produce an allergic or similar untoward reaction when administered to a human.

[0229] The optimal pharmaceutical composition will be determined by one skilled in the art depending upon, for example, the intended route of administration, delivery format, and desired dosage. See for example, Remington's Pharmaceutical Sciences, supra. Such compositions may influence the physical state, stability, rate of in vivo release, and rate of in vivo clearance of the polypeptide. For example, suitable compositions may be water for injection, physiological saline solution for parenteral administration.

### 7.10.1. Content of Pharmaceutically Active Ingredient

[0230] In typical embodiments, the active ingredient (i.e., the proteins and polypeptides of the present disclosure) is present in the pharmaceutical composition at a concentration of at least 0.01 mg/ml, at least 0.1 mg/ml, at least 0.5 mg/ml, or at least 1 mg/ml. In certain embodiments, the active ingredient is present in the pharmaceutical composition at a concentration of at least 1 mg/ml, 2 mg/ml, 3 mg/ml, 4 mg/ml, 5 mg/ml, 10 mg/ml, 15 mg/ml, 20 mg/ml, or 25 mg/ml. In certain embodiments, the active ingredient is present in the pharmaceutical composition at a concentration of at least 30 mg/ml, 35 mg/ml, 40 mg/ml, 45 mg/ml or 50 mg/ml.

[0231] In some embodiments, the pharmaceutical composition comprises one or more additional active ingredients in addition to the proteins or polypeptides of the present disclosure. The one or more additional active ingredients can be a drug targeting a different check point receptor, such as CTLA-4 inhibitor (e.g., anti-CTLA-4 antibody) or TIGIT inhibitor (e.g., anti-TIGIT antibody).

### 7.10.2. Formulation Generally

[0232] The pharmaceutical composition can be in any form appropriate for human or veterinary medicine, including a liquid, an oil, an emulsion, a gel, a colloid, an aerosol or a solid.

[0233] The pharmaceutical composition can be formulated for administration by any route of administration appropriate for human or veterinary medicine, including enteral and parenteral routes of administration.

[0234] In various embodiments, the pharmaceutical composition is formulated for administration by inhalation. In certain of these embodiments, the pharmaceutical composition is formulated for administration by a vaporizer. In certain of these embodiments, the pharmaceutical composition is formulated for administration by a nebulizer. In certain of these embodiments, the pharmaceutical composition is formulated for administration by an aerosolizer.

[0235] In various embodiments, the pharmaceutical composition is formulated for oral administration, for buccal administration, or for sublingual administration.

[0236] In some embodiments, the pharmaceutical composition is formulated for intravenous, intramuscular, or subcutaneous administration.

[0237] In some embodiments, the pharmaceutical composition is formulated for intrathecal or intracerebroventricular administration.

[0238] In some embodiments, the pharmaceutical composition is formulated for topical administration.

### 7.10.3. Pharmacological Compositions Adapted for Injection

[0239] For intravenous, cutaneous or subcutaneous injection, or injection at the site of affliction, the active ingredient will be in the form of a parenterally acceptable aqueous solution which is pyrogen-free and has suitable pH, isotonicity and stability. Those of relevant skill in the art are well able to prepare suitable solutions using, for example, isotonic vehicles such as Sodium Chloride Injection, Ringer's Injection, Lactated Ringer's Injection. Preservatives, stabilisers, buffers, antioxidants and/or other additives can be included, as required.

[0240] In various embodiments, the unit dosage form is a vial, ampule, bottle, or pre-filled syringe. In some embodiments, the unit dosage form contains 0.01 mg, 0.1 mg, 0.5 mg, 1 mg, 2.5 mg, 5 mg, 10 mg, 12.5 mg, 25 mg, 50 mg, 75 mg, or 100 mg of the pharmaceutical composition. In some embodiments, the unit dosage form contains 125 mg, 150 mg, 175 mg, or 200 mg of the pharmaceutical composition. In some embodiments, the unit dosage form contains 250 mg of the pharmaceutical composition.

[0241] In typical embodiments, the pharmaceutical composition in the unit dosage form is in liquid form. In various embodiments, the unit dosage form contains between 0.1 mL and 50 ml of the pharmaceutical composition. In some embodiments, the unit dosage form contains 1 ml, 2.5 ml, 5 ml, 7.5 ml, 10 ml, 25 ml, or 50 ml of pharmaceutical composition.

[0242] In particular embodiments, the unit dosage form is a vial containing 1 ml of the pharmaceutical composition at a concentration of 0.01 mg/ml, 0.1 mg/ml, 0.5 mg/ml, or 1 mg/ml. In some embodiments, the unit dosage form is a vial containing 2 ml of the pharmaceutical composition at a concentration of 0.01 mg/ml, 0.1 mg/ml, 0.5 mg/ml, or 1 mg/ml.

[0243] In some embodiments, the pharmaceutical composition in the unit dosage form is in solid form, such as a lyophilate, suitable for solubilization.

[0244] Unit dosage form embodiments suitable for subcutaneous, intradermal, or intramuscular administration include preloaded syringes, auto-injectors, and autoinject pens, each containing a predetermined amount of the pharmaceutical composition described hereinabove.

[0245] In various embodiments, the unit dosage form is a preloaded syringe, comprising a syringe and a predetermined amount of the pharmaceutical composition. In certain preloaded syringe embodiments, the syringe is adapted for subcutaneous administration. In certain embodiments, the syringe is suitable for self-administration. In particular embodiments, the preloaded syringe is a single use syringe.

[0246] In various embodiments, the preloaded syringe contains about 0.1 mL to about 0.5 mL of the pharmaceutical composition. In certain embodiments, the syringe contains about 0.5 mL of the pharmaceutical composition. In specific embodiments, the syringe contains about 1.0 mL of the pharmaceutical composition. In particular embodiments, the syringe contains about 2.0 mL of the pharmaceutical composition.

[0247] In certain embodiments, the unit dosage form is an autoinject pen. The autoinject pen comprises an autoinject pen containing a pharmaceutical composition as described herein. In some embodiments, the autoinject pen delivers a predetermined volume of pharmaceutical composition. In other embodiments, the autoinject pen is configured to deliver a volume of pharmaceutical composition set by the user.

[0248] In various embodiments, the autoinject pen contains about 0.1 mL to about 5.0 mL of the pharmaceutical composition. In specific embodiments, the autoinject pen contains about 0.5 mL of the pharmaceutical composition. In particular embodiments, the autoinject pen contains about 1.0 mL of the pharmaceutical composition. In other embodiments, the autoinject pen contains about 5.0 mL of the pharmaceutical composition.

### 7.11. Unit Dosage Forms

[0249] The pharmaceutical compositions may conveniently be presented in unit dosage form.

[0250] The unit dosage form will typically be adapted to one or more specific routes of administration of the pharmaceutical composition.

[0251] In various embodiments, the unit dosage form is adapted for administration by inhalation. In certain of these embodiments, the unit dosage form is adapted for administration by a vaporizer. In certain of these embodiments, the unit dosage form is adapted for administration by a nebulizer. In certain of these embodiments, the unit dosage form is adapted for administration by an aerosolizer.

[0252] In various embodiments, the unit dosage form is adapted for oral administration, for buccal administration, or for sublingual administration.

[0253] In some embodiments, the unit dosage form is adapted for intravenous, intramuscular, or subcutaneous administration.

[0254] In some embodiments, the unit dosage form is adapted for intrathecal or intracerebroventricular administration.

[0255] In some embodiments, the pharmaceutical composition is formulated for topical administration.

[0256] The amount of active ingredient which can be combined with a carrier material to produce a single dosage form will generally be that amount of the compound which produces a therapeutic effect.

### 7.12. Methods of Use

[0257] Therapeutic antibodies may be used that specifically bind to intact PD-1.

[0258] In vivo and/or in vitro assays may optionally be employed to help identify optimal dosage ranges. The precise dose to be employed in the formulation will also depend on the route of administration, and the seriousness of the condition, and should be decided according to the judgment of the practitioner and each subject's circumstances. Effective doses may be extrapolated from dose-response curves derived from in vitro or animal model test systems.

[0259] An oligopeptide or polypeptide is within the scope of the present disclosure if it has an amino acid sequence that is at least 75%, 76%, 77%, 78%, 79%, 80%, 81%, 82%, 83%, 84%, 85%, 86%, 87%, 88%, 89%, 90%, 91%, 92%, 93%, 94%, 95%, 96%, 97%, 98% or 99% identical to least one of the CDRs provided herein; and/or to a CDR of a PD-1 binding agent that cross-blocks the binding of at least one of antibodies A1-A28 to PD-1, and/or is cross-blocked from binding to PD-1 by at least one of antibodies A1-A28; and/or to a CDR of a PD-1 binding agent wherein the binding agent can block the binding of PD-1 to PD-L1.

[0260] PD-1 binding agent polypeptides and antibodies are within the scope of the present disclosure if they have amino acid sequences that are at least 85%, 86%, 87%, 88%, 89%, 90%, 91%, 92%, 93%, 94%, 95%, 96%, 97%, 98% or 99% identical to a variable region of at least one of antibodies A1-A28, and cross-block the binding of at least one of antibodies A1-A28 to PD-1, and/or are cross-blocked from binding to PD-1 by at least one of antibodies A1-A28; and/or can block the inhibitory effect of PD-1 on PD-L1.

[0261] Antibodies according to the present disclosure may have a binding affinity for human PD-1 of less than or equal to 5×10⁻⁷M, less than or equal to 1×10⁻⁷M, less than or equal to 0.5×10⁻⁷M, less than or equal to 1×10⁻⁸M, less than or equal to 1×10⁻⁹M, less than or equal to 1×10⁻¹⁰M, less than or equal to 1×10⁻¹¹M, or less than or equal to 1×10⁻¹²M.

[0262] The affinity of an antibody or binding partner, as well as the extent to which an antibody inhibits binding, can be determined by one of ordinary skill in the art using conventional techniques, for example those described by Scatchard et al. (Ann. N.Y. Acad. Sci. 51:660-672 (1949)) or by surface plasmon resonance (SPR; BIAcore, Biosensor, Piscataway, N.J.). For surface plasmon resonance, target molecules are immobilized on a solid phase and exposed to ligands in a mobile phase running along a flow cell. If ligand binding to the immobilized target occurs, the local refractive index changes, leading to a change in SPR angle, which can be monitored in real time by detecting changes in the intensity of the reflected light. The rates of change of the SPR signal can be analyzed to yield apparent rate constants for the association and dissociation phases of the binding reaction. The ratio of these values gives the apparent equilibrium constant (affinity) (see, e.g., Wolff et al., Cancer Res. 53:2560-65 (1993)).

[0263] An antibody according to the present disclosure may belong to any immunoglobin class, for example IgG, IgE, IgM, IgD, or IgA. It may be obtained from or derived from an animal, for example, fowl (e.g., chicken) and mammals, which includes but is not limited to a mouse, rat, hamster, rabbit, or other rodent, cow, horse, sheep, goat, camel, human, or other primate. The antibody may be an internalizing antibody. Production of antibodies is disclosed generally in U.S. Patent Publication No. 2004/0146888 A1.

[0264] In the methods described above to generate antibodies according to the present disclosure, including the manipulation of the specific A1-A28 CDRs into new frameworks and/or constant regions, appropriate assays are available to select the desired antibodies (i.e. assays for determining binding affinity to PD-1; cross-blocking assays; Biacore-based competition binding assay;” in vivo assays).

### 7.12.1. Methods of Treating a Disease Responsive to a PD-1 Inhibitor

[0265] In another aspect, methods are presented for treating a subject having a disease responsive to a PD-1 inhibitor. The disease can be cancer, AIDS, Alzheimer's disease or viral or bacterial infection.

[0266] The terms “treatment,” “treating,” and the like are used herein to generally mean obtaining a desired pharmacologic and/or physiologic effect. The effect may be prophylactic, in terms of completely or partially preventing a disease, condition, or symptoms thereof, and/or may be therapeutic in terms of a partial or complete cure for a disease or condition and/or adverse effect, such as a symptom, attributable to the disease or condition. “Treatment” as used herein covers any treatment of a disease or condition of a mammal, particularly a human, and includes: (a) preventing the disease or condition from occurring in a subject which may be predisposed to the disease or condition but has not yet been diagnosed as having it; (b) inhibiting the disease or condition (e.g., arresting its development); or (c) relieving the disease or condition (e.g., causing regression of the disease or condition, providing improvement in one or more symptoms). Improvements in any conditions can be readily assessed according to standard methods and techniques known in the art. The population of subjects treated by the method of the disease includes subjects suffering from the undesirable condition or disease, as well as subjects at risk for development of the condition or disease.

[0267] By the term “therapeutically effective dose” or “effective amount” is meant a dose or amount that produces the desired effect for which it is administered. The exact dose or amount will depend on the purpose of the treatment, and will be ascertainable by one skilled in the art using known techniques (see, e.g., Lloyd (1999) The Art, Science and Technology of Pharmaceutical Compounding).

[0268] The term “sufficient amount” means an amount sufficient to produce a desired effect.

[0269] The term “therapeutically effective amount” is an amount that is effective to ameliorate a symptom of a disease. A therapeutically effective amount can be a “prophylactically effective amount” as prophylaxis can be considered therapy.

[0270] The term “ameliorating” refers to any therapeutically beneficial result in the treatment of a disease state, e.g., a neurodegenerative disease state, including prophylaxis, lessening in the severity or progression, remission, or cure thereof

[0271] The actual amount administered, and rate and time-course of administration, will depend on the nature and severity of protein aggregation disease being treated. Prescription of treatment, e.g. decisions on dosage etc., is within the responsibility of general practitioners and other medical doctors, and typically takes account of the disorder to be treated, the condition of the individual patient, the site of delivery, the method of administration and other factors known to practitioners. Examples of the techniques and protocols mentioned above can be found in Remington's Pharmaceutical Sciences, 16th edition, Osol, A. (ed), 1980.

[0272] In some embodiments, the pharmaceutical composition is administered by inhalation, orally, by buccal administration, by sublingual administration, by injection or by topical application.

[0273] In some embodiments, the pharmaceutical composition is administered in an amount sufficient to modulate survival of neurons or dopamine release. In some embodiments, the major cannabinoid is administered in an amount less than lg, less than 500 mg, less than 100 mg, less than 10 mg per dose.

[0274] In some embodiments, the pharmaceutical composition is administered once a day, 2-4 times a day, 2-4 times a week, once a week, or once every two weeks.

[0275] A composition can be administered alone or in combination with other treatments, either simultaneously or sequentially dependent upon the condition to be treated. For example, the pharmaceutical composition can be administered in combination with one or more drugs targeting a different check point receptor, such as CTLA-4 inhibitor (e.g., anti-CTLA-4 antibody) or TIGIT inhibitor (e.g., anti-TIGIT antibody).

### 8. EXAMPLES

[0276] Below are examples of specific embodiments for carrying out the present disclosure. The examples are offered for illustrative purposes only, and are not intended to limit the scope of the present disclosure in any way. Efforts have been made to ensure accuracy with respect to numbers used (e.g., amounts, temperatures, etc.), but some experimental error and deviation should, of course, be allowed for.

[0277] The practice of the present disclosure will employ, unless otherwise indicated, conventional methods of protein chemistry, biochemistry, recombinant DNA techniques and pharmacology, within the skill of the art. Such techniques are explained fully in the literature. See, e.g., T. E. Creighton, Proteins: Structures and Molecular Properties (W.H. Freeman and Company, 1993); A. L. Lehninger, Biochemistry (Worth Publishers, Inc., current addition); Sambrook, et al., Molecular Cloning: A Laboratory Manual (2nd Edition, 1989); Methods In Enzymology (S. Colowick and N. Kaplan eds., Academic Press, Inc.); Remington's Pharmaceutical Sciences, 18th Edition (Easton, Pennsylvania: Mack Publishing Company, 1990); Carey and Sundberg Advanced Organic Chemistry 3^{rd} Ed. (Plenum Press) Vols A and B (1992). Furthermore, methods of generating and selecting antibodies explained in Adler et al., A natively paired antibody library yields drug leads with higher sensitivity and specificity than a randomly paired antibody library, MAbs (2018), and Adler et al., Rare, high-affinity mouse anti-PD-1 antibodies that function in checkpoint blockade, discovered using microfluidics and molecular genomics, MAbs (2017), which are incorporated by reference in its entirety herein, can be employed.

### 8.1.1. Example 1:Generation of Antigen Binding Protein

[0278] Mouse Immunization and Sample Preparation:

[0279] First, transgenic mice carrying inserted human immunoglobulin genes were immunized with soluble PD-1 immunogen of SEQ ID NO: 7001 (i.e., His-tagged PD-1 protein (R&D Systems)) using TiterMax as an adjuvant. One μg of immunogen was injected into each hock and 3 μg of immunogen was administered intraperitoneally, every third day for 15 days. Titer was assessed by enzyme-linked immunosorbent assay (ELISA) on a 1:2 dilution series of each animal's serum, starting at a 1:200 dilution. A final intravenous boost of 2.5 μg/hock without adjuvant was given to each animal before harvest. Lymph nodes (popliteal, inguinal, axillary, and mesenteric) were surgically removed after sacrifice. Single cell suspensions for each animal were made by manual disruption followed by passage through a 70 μm filter. Next, the EasySep™ Mouse Pan-B Cell Isolation Kit (Stemcell Technologies) negative selection kit was used to isolate B cells from each sample. The lymph node B cell populations were quantified by counting on a C-Chip hemocytometer (Incyto) and assessed for viability using Trypan blue. The cells were then diluted to 5,000-6,000 cells/mL in phosphate-buffered saline (PBS) with 12% OptiPrep™ Density Gradient Medium (Sigma). This cell mixture was used for microfluidic encapsulation. Approximately one million B cells were run from each of the six animals through the emulsion droplet microfluidics platform.

[0280] Generating Paired Heavy and Light Chain Libraries:

[0281] A DNA library encoding scFv from RNA of single cells, with native heavy-light Ig pairing intact, was generated using the emulsion droplet microfluidics platform or vortex emulsions. The method for generating the DNA library was divided into 1) poly(A)+mRNA capture, 2) multiplexed overlap extension reverse transcriptase polymerase chain reaction (OE-RT-PCR), and 3) nested PCR to remove artifacts and add adapters for deep sequencing or yeast display libraries. The scFv libraries were generated from approximately one million B cells from each animal that achieved a positive ELISA titer.

[0282] For poly(A)+mRNA capture, a custom designed co-flow emulsion droplet microfluidic chip fabricated from glass (Dolomite) was used. The microfluidic chip has two input channels for fluorocarbon oil (Dolomite), one input channel for the cell suspension mix described above, and one input channel for oligo-dT beads (NEB) at 1.25 mg/ml in cell lysis buffer (20 mM Tris pH 7.5, 0.5 M NaCl, 1 mM ethylenediaminetetraacetic acid (EDTA), 0.5% Tween-20, and 20 mM dithiothreitol). The input channels were etched to 50 μm by 150 μm for most of the chip's length, narrow to 55 p.m at the droplet junction, and were coated with hydrophobic Pico-Glide (Dolomite). Three Mitos P-Pump pressure pumps (Dolomite) were used to pump the liquids through the chip. Droplet size depends on pressure, but typically droplets of ˜45 mm diameter are optimally stable. Emulsions were collected into chilled 2 ml microcentrifuge tubes and incubated at 40° C. for 15 minutes for mRNA capture. The beads were extracted from the droplets using Pico-Break (Dolomite). In some embodiments, similar single cell partitioning emulsions were made using a vortex.

[0283] For multiplex OE-RT-PCR, glass Telos droplet emulsion microfluidic chips (Dolomite) were used. mRNA-bound beads were re-suspended into OE-RT-PCR mix and injected into the microfluidic chips with a mineral oil-based surfactant mix (available commercially from GigaGen) at pressures that generate 27 μm droplets. The OE-RT-PCR mix contains 2× one-step RT-PCR buffer, 2.0 mM MgSO₄, SuperScript III reverse transcriptase, and Platinum Taq (Thermo Fisher Scientific), plus a mixture of primers directed against the IgK C region, the IgG C region, and all V regions (FIG. 2). The overlap region is a DNA sequence that encodes a Gly-Ser rich scFv linker sequence. The DNA fragments are recovered from the droplets using a droplet breaking solution (available commercially from GigaGen) and then purified using QlAquick PCR Purification Kit (Qiagen). In some embodiments, similar OE-RT-PCR emulsions were made using a vortex.

[0284] For nested PCR (FIG. 2), the purified OE-RT-PCR product was first run on a 1.7% agarose gel for 80 minutes at 150 V. A band at 1200-1500 base pair (bp) corresponding to the linked product was excised and purified using NucleoSpin Gel and PCR Clean-up Kit (Macherey Nagel). PCR was then performed to add adapters for Illumina sequencing or yeast display; for sequencing, a randomer of seven nucleotides is added to increase base calling accuracy in subsequent next generation sequencing steps. Nested PCR was performed with 2× NEBNext High-Fidelity amplification mix (NEB) with either Illumina adapter containing primers or primers for cloning into the yeast expression vector. The nested PCR product was run on a 1.2% agarose gel for 50 minutes at 150V. A band at 800-1100 bp was excised and purified using NucleoSpin Gel and PCR Clean-up Kit (Macherey Nagel).

[0285] In some embodiments, scFv libraries were not natively paired, for example, randomly paired by amplifying scFv directly from RNA isolated from B cells.

### 8.1.2. Example 2: Isolation of PD-1 Binders by Yeast Display

[0286] Library Screening:

[0287] Human IgG1-Fc (Thermo Fisher Scientific) and PD-1 (R&D Systems) proteins were biotinylated using the EZ-Link Micro Sulfo-NHS-LC-Biotinylation kit (Thermo Fisher Scientific). The biotinylation reagent was resuspended to 9 mM and added to the protein at a 50-fold molar excess. The reaction was incubated on ice for 2 hours and then the biotinylation reagent was removed using Zeba desalting columns (Thermo Fisher Scientific). The final protein concentration was calculated with a Bradford assay.

[0288] Next, the six DNA libraries were expressed as surface scFv in yeast. A yeast surface display vector (pYD) that contains a GAL1/10 promoter, an Aga2 cell wall tether, and a C-terminal c-Myc tag was built. The GAL1/10 promoter induces expression of the scFv protein in medium that contains galactose. The Aga2 cell wall tether was required to shuttle the scFv to the yeast cell surface and tether the scFv to the extracellular space. The c-Myc tag was used during the flow sort to stain for yeast cells that express in-frame scFv protein. Saccharomyces cerevisiae cells (ATCC) were electroporated (Bio-Rad Gene Pulser II; 0.54 kV, 25 uF, resistance set to infinity) with gel-purified nested PCR product and linearized pYD vector for homologous recombination in vivo. Transformed cells were expanded and induced with galactose to generate yeast scFv display libraries.

[0289] Two million yeast cells from the expanded scFv libraries were stained with anti-c-Myc (Thermo Fisher Scientific A21281) and an AF488-conjugated secondary antibody (Thermo Fisher Scientific A11039). To select scFv-expressing cells that bind to PD-1, biotinylated PD-1 antigen was added to the yeast culture (7 nM final) during primary antibody incubation and then stained with PE-streptavidin (Thermo Fisher Scientific). Yeast cells were flow sorted on a BD Influx (Stanford Shared FACS Facility) for double-positive cells (AF488C/PEC), and recovered clones were then plated on SD-CAA plates with kanamycin, streptomycin, and penicillin (Teknova) for expansion. The expanded first round FACS clones were then subjected to a second round of FACS with the same antigen at the same molarity (7 nM final). Plasmid minipreps (Zymo Research) were prepared from yeast recovered from the final FACS sort. Tailed-end PCR was used to add Illumina adapters to the plasmid libraries for deep sequencing.

[0290] In a typical FACS dot plot, the upper right quadrant contains yeast that stain for both antigen binding and scFv expression (identified by a C-terminal c-Myc tag). The lower left quadrant contains yeast that do not stain for either the antigen or scFv expression. The lower right quadrant contains yeast that express the scFv but do not bind the antigen. The frequency of binders in each repertoire was estimated by dividing the count of yeast that double stain for antigen and scFv expression by the count of yeast that express an scFv. Libraries generated from immunized mice yielded low percentages of scFv binders (ranging from 0.08%-1.28%) when sorted at 7 nM final antigen concentration. There was no clear association between serum titer and the frequency of binders in a repertoire. Following expansion of these sorted cells, a second round of FACS at 7 nM final antigen concentration was used to increase the specificity of the screen. The frequency of binders in the second FACS was always substantially higher than the first FACS, ranging from 8.39%-84.4%. Generally, lower frequency of binders in the first sort yielded lower frequency of binders in the second sort. Presumably, this is due to lower gating specificity for samples that have fewer bona fide binders in the original repertoire.

[0291] Deep Repertoire Sequencing:

[0292] PD-1-binding clones were recovered as a library (“a library of PD-1 binding clones”), and subjected to deep repertoire sequencing. The library of PD-L1 binding clones were deposited under ATCC Accession No. PTA-125509 under the Budapest Treaty on Nov. 20, 2018, under ATCC Account No. 97361 (American Type Culture Collection (ATCC), 10801 University Boulevard, Manassas, Va. 20110 USA). Each clone in the library contains an scFv comprising a paired variable (V(D)J) regions of both heavy and light chain sequences originating from a single cell. Deep repertoire sequencing determines the sequences of all paired variable (V(D)J) regions of both heavy and light chain sequences. Some of the heavy and light chain sequences obtained from sequencing the yeast scFv library are provided in SEQ ID NOS: 1-28 and SEQ ID NOS: 101-128. Additional sequences obtained from sequencing the yeast scFv library are provided in SEQ ID NOS 8001-9045. Specifically, their variable light chain (V_{L}) sequences include SEQ ID NOS: 8001-8522. Their variable heavy chain (V_{H}) sequences include SEQ ID NOS: 8523-9045 .

[0293] Deep antibody sequencing libraries were quantified using a quantitative PCR Illumina Library Quantification Kit (KAPA) and diluted to 17.5 pM. Libraries were sequenced on a MiSeq (Illumina) using a 500 cycle MiSeq Reagent Kit v2, according to the manufacturer's instructions. To obtain high quality sequence reads with maintained heavy and light chain linkage, sequencing was performed in two separate runs. In the first run (“linked run”), the scFv libraries were directly sequenced to obtain forward read of 340 cycles for the light chain V-gene and CDR3, and reverse read of 162 cycles that cover the heavy chain CDR3 and part of the heavy chain V-gene. In the second run (“unlinked run”), the scFv library was first used as a template for PCR to separately amplify heavy and light chain V-genes. Then, forward reads of 340 cycles and reverse reads of 162 cycles for the heavy and light chain Ig were obtained separately. This produces forward and reverse reads that overlap at the CDR3 and part of the V-gene, which increases confidence in nucleotide calls.

[0294] To remove base call errors, the expected number of errors (E) for a read were calculated from its Phred scores. By default, reads with E>1 were discarded, leaving reads for which the most probable number of base call errors is zero. As an additional quality filter, singleton nucleotide reads were discarded because sequences found two or more times have a high probability of being correct. Finally, high-quality, linked antibody sequences were generated by merging filtered sequences from the linked and unlinked runs. Briefly, a series of scripts that first merged forward and reverse reads from the unlinked run were written in Python. Any pairs of forward and reverse sequences that contained mismatches were discarded. Next, the nucleotide sequences from the linked run were used to query merged sequences in the unlinked run. The final output from the scripts is a series of full-length, high-quality variable (V(D)J) sequences, with native heavy and light chain Ig pairing.

[0295] To identify reading frame and FR/CDR junctions, a database of well-curated immunoglobulin sequences was first processed to generate position-specific sequence matrices (PSSMs) for each FR/CDR junction. These PSSMs were used to identify FR/CDR junctions for each of the merged nucleotide sequences generated using the processes described above. This identified the protein reading frame for each of the nucleotide sequences. CDR sequences that have a low identify score to the PSSMs are indicated by an exclamation point. Python scripts were then used to translate the sequences. Reads were required to have a valid predicted CDR3 sequence, so, for example, reads with a frame-shift between the V and J segments were discarded. Next, UBLAST was run using the scFv nucleotide sequences as queries and V and J gene sequences from the IMGT database as the reference sequences. The UBLAST alignment with the lowest E-value was used to assign V and J gene families and compute %ID to germline.

[0296] Each animal yielded 38-50 unique scFv sequences present at 0.1% frequency or greater after the second FACS selection, including a total of 28 unique scFv candidate binders (SEQ ID Nos: 1-28 for light chains; SEQ ID Nos: 101-128 for heavy chains). The light chain having a sequence of SEQ ID NO: [n] and the heavy chain having a sequence of SEQ ID NO: [100+n] are a cognate pair from a single cell, and forming a single scFv. For example, the light chain of SEQ ID NO:1 and the heavy chain of SEQ ID NO:101 are a cognate pair, the light chain of SEQ ID NO:11 and the heavy chain of SEQ ID NO:111 are a cognate pair, etc.

[0297] In this method, the two rounds of FACS resulted in enrichment of the PD-1-binding scFvs. In addition, many scFv were not detected in the sequencing data from the initial population of B cells from the immunized mice and most of the scFv present in the pre-sort mouse repertoires were eliminated following FACS. Therefore, this work suggests that most of the antibodies present in the repertoires of immunized mice are not strong binders to the immunogen and that this method can enrich for rare nM-affinity binders from the initial population of B cells from immunized mice.

### 8.1.3. Example 3: Biological Characteristics of Antigen Binding Protein

[0298] scFv sequences that were present at low frequency in pre-sort libraries and became high frequency in post-sort libraries were then synthesized as full-length mAbs in Chinese hamster ovary (CHO) cells. These mAbs comprise the 2-3 most abundant sequences in the second round of FACS for each animal. In addition, antibody sequences that suggest convergent evolution between the SJL and Balb/c mouse strains were selected.

[0299] The full-length mAbs were validated for binding kinetics through bio-layer interferometry (BLI) and/or surface plasma resonance (SPR), and checkpoint inhibition through in vitro cellular assays.

[0300] Target Binding Profiles:

[0301] The binding specificity and affinity of each full-length antibody towards PD-1 were determined using BLI and/or SPR. Anti-human PD-1 affinity used SPR for A1-A11 and BLI for A12-A28. Anti-cyno PD-1 affinity was measured using BLI.

[0302] For BLI, antibodies were loaded onto an Anti-Human IgG Fc (AHC) biosensor using the Octet Red96 system (ForteBio). Loaded biosensors were dipped into antigen dilutions beginning at 300 nM, with 6 serial dilutions at 1:3. Kinetic analysis was performed using a 1:1 binding model and global fitting.

[0303] For SPR, a moderate density (»1,000 Response Units) of an antihuman IgG-Fc reagent (Southern Biotech 2047-01) was amine-coupled to a Xantec CMD-50M chip (50 nm carboxymethyldextran medium density of functional groups) activated with 133 mM EDC (Sigma) and 33.3 mM S-NHS (ThermoFisher) in 100 mM MES pH 5.5. Then, goat anti-Human IgG Fc (Southern Biotech 2047-01) was coupled for 10 minutes at 25 mg/m L in 10 mM Sodim Acetate pH 4.5 (Carterra Inc.). The surface was then deactivated with 1 M ethanolamine pH 8.5 (Carterra Inc.). Running buffer used for the lawn immobilization was HBS-EPC (10 mM HEPES, 150 mM NaCl, 3 mM EDTA, 0.05% Tween 20, pH 7.4; Teknova).

[0304] The sensor chip was then transferred to a continuous flow microspotter (CFM; Carterra Inc.) for array capturing. The mAb supernatants were diluted 50-fold (3-10 mg/mL final concentration) into HBS-EPC with 1 mg/mL BSA. The samples were each captured twice with 15-minute and 4-minute capture steps on the first and second prints, respectively, to create multiple densities, using a 65 mL/min flow rate. The running buffer in the CFM was also HBS-EPC.

[0305] Next, the sensor chip was loaded onto an SPR reader (MX-96 system; Ibis Technologies) for the kinetic analysis. PD-1 was injected at five increasing concentrations in a four-fold dilution series with concentrations of 1.95, 7.8, 31.25, 125, and 500 nM in running buffer (HBS-EPC with 1.0 mg/mL BSA). PD-1 injections were 5 minutes with a 15-minute dissociation at 8 mL/second in a non-regenerative kinetic series. An injection of the goat anti-Human IgG Fc capture antibody at 75 mg/mL was injected at the end of the series to verify the capture level of each mAb. Binding data was double referenced by subtracting an interspot surface and a blank injection and analyzed for ka (on-rate), kd (off-rate), and KD (affinity) using the Kinetic Interaction Tool software (Carterra Inc.).

[0306] For cell surface binding studies, Stable PD-1 expressing Flp-In CHO (Thermo Fisher Scientific) cells were generated and mixed at a 50:50 ratio. One million cells were stained with 1μg of the anti-PD-1 recombinant antibodies in 200 μl of MACS Buffer (DPBS with 0.5% bovine serum albumin and 2 mM EDTA) for 30 minutes at 4 C. Cells were then co-stained with anti-human CD134 (OX40)-APC [Ber-ACT35] (BioLegend 350008) and anti-human IgG Fc-PE [M1310G05] (BioLegend 41070) antibodies for 30 minutes at 4 C. An anti-human CD279 (PD-1)-FITC [EH12.2H7] (BioLegend 329903) antibody was used as a control for these mixing experiments and cell viability was assessed with DAPI. Flow cytometry analysis was conducted on a BD Influx at the Stanford Shared FACS Facility and data was analyzed using FlowJo.

[0307] Antibodies that specifically bind to PD-1, with affinities (K_{D} ) ranging from 10-280 nM, were identified. Affinity to PD-1 (K_{D} ) of each antibody is provided in TABLE 6.

[0308] Those skilled in the art can appreciate that non-cognately paired antibodies (e.g., Adler et al., 2018) often retain strong affinity and desirable pharmacological properties. In some manifestations, the present disclosure describes the heavy or light chain sequences in TABLE 6, non-cognately paired to other heavy or light chain sequences in TABLE 6, or non-cognately paired to any other heavy or light chain sequence.

TABLE 6

| | | Affinity | PD-1/PD-L1 | Affinity | |
|---|---|---|---|---|---|
| | Binding | to Human | blockage | to Cyno | |
| | to PD-1 | PD-1 | (IC50, | PD-1 | Epitope |
| Ab# | (FACS) | (K_{D}, nM) | μg/ml) | (K_{D}, nM) | bin |
| Pembro- | Yes | 16 | 0.06 | 14 | A |
| lizumab | | | | | |
| A1 | Yes | 3.7 | 2.39 | no binding | A |
| A2 | Yes | 130 | no-blocking | no binding | B |
| A3 | Yes | 230 | 1.3395 | no binding | A |
| A4 | Yes | 20 | 2.1215 | 0.1 | A |
| A5 | Yes | 35 | 1.306 | no binding | A |
| A6 | Yes | 70 | 1.116 | 26 | A |
| A7 | Yes | 160 | no-blocking | no binding | B |
| A8 | Yes | 410 | no-blocking | 447 | B |
| A9 | Yes | 24 | 0.461 | 42 | A |
| A10 | Yes | 10 | 1.635 | 12 | C |
| A11 | Yes | no binding | 1.309 | not tested | not tested |
| A12 | Yes | 5.1 | 3.163 | not tested | not tested |
| A13 | Yes | 86.7 | no-blocking | not tested | not tested |
| A14 | Yes | no binding | no-blocking | not tested | not tested |
| A15 | Yes | 8.3 | no-blocking | not tested | not tested |
| A16 | Yes | 86 | 0.556 | not tested | not tested |
| A17 | Yes | 326 | 0.5326 | not tested | not tested |
| A18 | Yes | 18.4 | no-blocking | not tested | not tested |
| A19 | Yes | 57.1 | >3.163 | not tested | not tested |
| A20 | Yes | 148 | no-blocking | not tested | not tested |
| A21 | Yes | 13 | no-blocking | not tested | not tested |
| A22 | Yes | 412 | no-blocking | not tested | not tested |
| A23 | Yes | 83.8 | 0.1164 | not tested | not tested |
| A24 | Yes | 8.5 | 0.2655 | not tested | not tested |
| A25 | Yes | 792 | no-blocking | not tested | not tested |
| A26 | Yes | 6 | 0.6411 | not tested | not tested |
| A27 | Yes | 13.8 | 0.5282 | not tested | not tested |
| A28 | Yes | 23.8 | 0.5425 | not tested | not tested |

[0309] In Vitro Cellular Assay:

[0310] For analysis of the antibodies' ability to block the PD-1/PD-L1 interaction, the PD-1/PD-L1 Blockade Bioassay (Promega) was used according to the manufacturer's instructions. On the day prior to the assay, PD-L1 aAPC/CHO-K1 cells were thawed into 90% Ham's F-12/10% fetal bovine serum (FBS) and plated into the inner 60 wells of two 96-well plates. The cells were incubated overnight at 37° C., 5% CO₂. On the day of assay, antibodies were diluted in 99% RPMI/1% FBS. The antibody dilutions were added to the wells containing the PD-L1 aAPC/CHO-K1 cells, followed by addition of PD-1 effector cells (thawed into 99% RPMI/1% FBS). The cell/antibody mixtures were incubated at 37° C., 5% CO₂ for 6 hours, after which Bio-Glo Reagent was added and luminescence was read using a Spectramax i3× plate reader (Molecular Devices). Fold-induction was plotted by calculating the ratio of [signal with antibody]/[signal with no antibody], and the plots were used to calculate the IC50 using SoftMax Pro (Molecular Devices). In-house produced pembrolizumab was used as a positive control, and an antibody binding to an irrelevant antigen was used as a negative control.

[0311] Binding of PD-1 to PD-L1 leads to inhibition of T cell signaling. Antibodies that bind PD-1 and antagonize PD-1/PD-L1 interactions can therefore remove this inhibition, allowing T cells to be activated. PD-1/PD-L1 checkpoint blockade was tested through an in vitro cellular Nuclear Factor of Activated T cells (NFAT) luciferase reporter assay. In this assay, antibodies whose anti-PD-1 epitopes fall inside the PD-L1 binding domain antagonize PD-1/PD-L1 interactions, resulting in an increase of the NFAT-luciferase reporter. The full-length mAb candidates that can bind PD-1 expressed in CHO cells were assayed. To generate an IC50 value for each mAb, measurements were made across several concentrations. Some full-length mAbs (tPD1.1 (A1), tPD1.3 (A3), tPD1.4 (A4), tPD1.5 (A5), tPD1.6 (A6), tPD1.16 (A9), and tPD1.19 (A10)) are functional in checkpoint blockade in a dose dependent manner, as summarized in TABLE 6. CDR sequences of the seven antibodies are conserved as summarized below in TABLE 7 and can be provided using their consensus sequences.

[0312] In some embodiments of the present disclosure, the anti-PD-1 antibodies function pharmacologically by antibody-dependent cell-mediated cytotoxicity (ADCC). In some embodiments of the present disclosure, immune-related toxicities related to anti-PD-1 antibody therapy are abrogated with an antibody that functions in ADCC but which does not function in checkpoint blockade.

TABLE 7

| | | | Sequence |
|---|---|---|---|
| | | Consensus | identity |
| CDR | Individual sequences | sequences | (%) |
| CDR1-L | QGIRND (A1-SEQ ID NO: 1001; A6-1006) | Q X1 I X2 X3 X4, | ≥33% |
| | QGIRNE (A3-SEQ ID NO: 1003) | wherein X1 is G or | |
| | QGISSW (A4-SEQ ID NO: 1004; A10-SEQ ID NO: 1010; | D; X2 is R or S; | |
| | A11-SEQ ID NO: 1011) | X3 is N or S; and | |
| | QGISSA (A5-SEQ ID NO: 1005) | X4 is D, E, or W | |
| | QGIRND (A6-SEQ ID NO: 1006) | | |
| | QDIRND (A9-SEQ ID NO: 1009) | | |
| CDR2-L | VAS (A1-SEQ ID NO: 2001) | X5 A S, wherein | ≥66% |
| | AAS (A2-SEQ ID NO: 2002; A3-SEQ ID NO: 2003; A4- | X5 is V, A or D | |
| | SEQ ID NO: 2004; A6-SEQ ID NO: 2006; A9-SEQ ID | | |
| | NO: 2009; A10-SEQ ID NO: 2010; A11-SEQ ID NO: 2011) | | |
| | DAS (A5-SEQ ID NO: 2005; A8-SEQ ID NO: 2008) | | |
| CDR3-L | LQHNSYPLT (A1-SEQ ID NO: 3001) | X6 Q X7 X8 X9 Y | ≥44% |
| | LQHYIYPWT (A3-SEQ ID NO: 3003) | P X10 T (SEQ ID | |
| | QQYNSYPYT (A4-SEQ ID NO: 3004; A10-SEQ ID | NO: 12184), | |
| | NO: 3010) | wherein X6 is L or | |
| | QQFNNYPWT (A5-SEQ ID NO: 3005) | Q; X7 is H, Y, F, | |
| | LQHNSYPWT (A6-SEQ ID NO: 3006) | or D; X8 is N or Y; | |
| | LQDNNYPRT (A9-SEQ ID NO: 3009) | X9 is S, I or N; | |
| | QQYNSYPYT (A4-SEQ ID NO: 3004; A10-SEQ ID | X10 is L, W, Y or | |
| | NO: 3010) | R | |
| CDR1-H | GFTFSNYG (A1-SEQ ID NO: 4001; A5-SEQ ID | G X11 T F X12 | ≥63% |
| | NO: 4005; A9-SEQ ID NO: 4009) | X13 Y G (SEQ ID | |
| | GFTFSDYG (A3-SEQ ID NO: 4003) | NO: 12185), | |
| | GYTFATYG (A4-SEQ ID NO: 4004) | wherein X11 is F | |
| | GYTFTSYG (A7-SEQ ID NO: 4007) | or Y; X12 is S or | |
| | GFTFSSYG (A2- SEQ ID NO: 4002; A6-SEQ ID | A; X13 is N, D, T, | |
| | NO: 4006; A8-SEQ ID NO: 4008) | S or I | |
| | GYTFAIYG (A10-SEQ ID NO: 4010) | | |
| CDR2-H | IWYDGSNK (A1-SEQ ID NO: 5001; A3-SEQ ID | (i) I W Y D G X14 | (i) and |
| | NO: 5003; A5-SEQ ID NO: 5005; A6-SEQ ID NO: 5006) | N K (SEQ ID NO: | (ii) |
| | ISAYSDNI (A4-SEQ ID NO: 5004) | 12186), wherein | ≥88% |
| | ISAYSDNS (A10-SEQ ID NO: 5010) | X14 is S or T, or | |
| | | (ii) I S A Y S D N | |
| | | X15 (SEQ ID NO: | |
| | | 12187), wherein | |
| | | X15 is I or S | |
| CDR3-H | AGGGNYYGDY (A1-SEQ ID NO: 6001) | (i) A G G G X16 | (i) ≥70%, |
| | AGGGSYWGDY (A3-SEQ ID NO: 6003) | Y X17 G D X18 | and (ii) |
| | ARDGSHGDYYYGMDV (A4-SEQ ID NO: 6004) | (SEQ ID NO: | ≥93% |
| | ARDRIYCSSTRCIGFGYYYYGMDV (A5-SEQ ID | 12188), wherein | |
| | NO: 6005) | X16 is N or S; X17 | |
| | AGGGNYWGDF (A6-SEQ ID NO: 6006) | is Y or W; X18 is | |
| | ATNSDDY (A9-SEQ ID NO: 6009) | Y or F, (ii) X19 R | |
| | VRDGSHGDYYYGMDV (A10-SEQ ID NO: 6010) | D G S H G D Y Y | |
| | | Y G M D V (SEQ | |
| | | ID NO: 12189), | |
| | | wherein X19 is A | |
| | | or V, (iii) A T N S | |
| | | D D Y (SEQ ID | |
| | | NO: 6009), or (iv) | |
| | | A R D R I Y C S S | |
| | | T R C I G F G Y | |
| | | Y Y Y G M D V | |
| | | (SEQ ID NO: | |
| | | 6005) | |

[0313] The affinity of each antibody against human PD-1 was determined using Carterra (A1-A11) or ForteBio (Al2-A28). The on rate, off rate, and K_{D} were determined and are shown in TABLE 8.

TABLE 8

| Antibody | kₒₙ (M−1 s−1) | k_{off} (s−1) | K_{D} (M) |
|---|---|---|---|
| Pembrolizumab | 1.20E+05 | 2.00E−03 | 1.60E−08 |
| A1 | 7.00E+03 | 2.60E−05 | 3.70E−09 |
| A2 | 8.00E+04 | 1.10E−02 | 1.30E−07 |
| A3 | 1.00E+04 | 2.40E−03 | 2.30E−07 |
| A4 | 1.20E+04 | 2.50E−04 | 2.00E−08 |
| A5 | 6.40E+03 | 2.30E−04 | 3.50E−08 |
| A6 | 1.20E+04 | 8.60E−04 | 7.00E−08 |
| A7 | 1.20E+04 | 2.00E−03 | 1.60E−07 |
| A8 | 8.40E+04 | 3.50E−02 | 4.10E−07 |
| A9 | 3.20E+04 | 7.90E−04 | 2.40E−08 |
| A10 | 6.60E+03 | 6.90E−05 | 1.00E−08 |
| A11 | no binding | | |
| A12 | 1.02E+05 | 5.16E−04 | 5.05E−09 |
| A13 | 3.39E+04 | 2.94E−03 | 8.67E−08 |
| A14 | no binding | | |
| A15 | 2.35E+05 | 1.95E−03 | 8.32E−09 |
| A16 | 7.61E+04 | 6.55E−03 | 8.60E−08 |
| A17 | 2.42E+04 | 7.90E−03 | 3.26E−07 |
| A18 | 1.24E+05 | 2.28E−03 | 1.84E−08 |
| A19 | 1.87E+04 | 1.07E−03 | 5.71E−08 |
| A20 | 1.30E+04 | 1.91E−03 | 1.48E−07 |
| A21 | 1.10E+05 | 1.42E−03 | 1.30E−08 |
| A22 | 1.62E+04 | 6.67E−03 | 4.12E−07 |
| A23 | 2.20E+04 | 1.84E−03 | 8.38E−08 |
| A24 | 2.17E+05 | 1.85E−03 | 8.50E−09 |
| A25 | 7.31E+04 | 5.79E−02 | 7.92E−07 |
| A26 | 1.74E+05 | 1.04E−03 | 5.98E−09 |
| A27 | 7.04E+04 | 9.72E−04 | 1.38E−08 |
| A28 | 1.76E+05 | 4.18E−03 | 2.38E−08 |

[0314] Epitope Binning:

[0315] Epitope binning was performed using high-throughput Array SPR in a modified classical sandwich approach. A sensor chip was functionalized using the Carterra CFM and methods similar to the SPR affinity studies, except a CMD-200M chip type was used (200 nm carboxymethyl dextran, Xantec) and mAbs were coupled at 50 mg/mL to create a surface with higher binding capacity (˜3,000 reactive units immobilized). The mAb supernatants were diluted at 1:1 or 1:10 in running buffer, depending on the concentration of the mAb in the supernatant.

[0316] The sensor chip was placed in the MX-96 instrument, and the captured mAbs (“ligands”) were crosslinked to the surface using the bivalent amine reactive linker bis(sulfosuccinimidyl) suberate (BS3, ThermoFisher), which was injected for 10 minutes at 0.87 mM in water. Excess activated BS3 was neutralized with 1 M ethanolamine pH 8.5. For each binning cycle, a 7-minute injection of 250 mg/mL human IgG (Jackson ImmunoResearch 009-000-003) was used to block reference surfaces and any remaining capacity of the target spots.

[0317] Next, 250 nM PD-1 protein was injected onto the sensor chip, followed by injections of the diluted mAb supernatants (“analytes”) or buffer blanks as negative controls. Thus, the analyte mAb only bound to the antigen if it was not competitive with the ligand mAb. At the end of each cycle, a one minute regeneration injection was performed using a solution of 4 parts Pierce IgG Elution Buffer (ThermoFisher #21004), one part 5 M NaCl (0.83 M final), and 1.25 parts 0.85% H₃PO₄ (0.17% final). Only 18 of the mAbs remained active as ligands through multiple regenerations, so the binning analysis comprised an 18 by 46 competitive matrix.

[0318] A network community plot algorithm was then used in an SPR epitope data analysis software package (Carterra Inc.) to determine epitope bins. Note that the clustering algorithm groups mAbs for which only analyte data are available cluster separately from the mAbs for which both ligand and analyte data are available. This phenomenon is an artifact of the incomplete competitive matrix. mAbs with both ligand and analyte data had more mAb-mAb measurements, resulting in more mAb-mAb connections, which led to a closer relationship in the community plot.

[0319] The antibodies that were subject to the epitope binning were assigned to three different groups (A, B, and C in TABLE 6 and FIG. 3).

### 9. INCORPORATION BY REFERENCE

[0320] All publications, patents, patent applications and other documents cited in this application are hereby incorporated by reference in their entireties for all purposes to the same extent as if each individual publication, patent, patent application or other document were individually indicated to be incorporated by reference for all purposes.

### 10. EQUIVALENTS

[0321] While various specific embodiments have been illustrated and described, the above specification is not restrictive. It will be appreciated that various changes can be made without departing from the spirit and scope of the present disclosure(s). Many variations will become apparent to those skilled in the art upon review of this specification.

### Table 9 Provides the Sequences and Sequence Identifiers for Antibody Light Chains, Antibody Heavy Chains, Correspondind CDRs, and PD-1.

TABLE 9

| SEQ ID | | Chain |
|---|---|---|
| NO | Sequence | (Antibody) |
| 1 | DIQMTQSPSSLSASVGDRVTITCRASQGIRNDLGWYQQKPGKAPKRLIYV | L1 (A1) |
| | ASSLQSGVPSRFSGSGSGTEFTLTISSLQPEDFATYYCLQHNSYPLTFGGGT | |
| | KVEIKR | |
| 2 | DIQMTQSPSSLSASVGDRVTITCRASQAIRNDLGWFQQKPGKAPKRLIYA | L2 (A2) |
| | ASSLQSGVPLRFSGSGSGTEFTLTISSLQPEDFATYYCLQHNSFPWTFGQGT | |
| | KVEIKR | |
| 3 | DIQMTQSPSSLSASVGDRVTITCRASQGIRNELGWYQQKPGKAPKRLIYA | L3 (A3) |
| | ASSLQSGVPSRFSGSGSGTEFTLTISSLQPEDFATYYCLQHYTYPWTFGQGT | |
| | KVEIKR | |
| 4 | DIQMTQSPSSLSASVGDRVTITCRASQGISSWLAWYQQKPEKAPKSLIYAA | L4 (A4) |
| | SSLQSGVPSRFSGSGSGTDFTLTISSLQPEDFATYYCQQYNSYPYTFGQGT | |
| | KLEIKR | |
| 5 | AIQLTQSPSSLSASVGDRVTITCRASQGISSALAWYQQKPGKAPKLLIYDA | L5 (A5) |
| | SSLESGVPSRFSGSGSGTDFTLTISSLQPEDFATYYCQQFNNYPWTFGQGT | |
| | KVEIKR | |
| 6 | DIQMTQSPSSLSASVGDRVTITCRASQGIRNDLGWYQQKPGKAPKRLLYA | L6 (A6) |
| | ASNLQLGVPSRFSGSGSETEFTLTISSLQPEDFATYYCLQHNSYPWTFGQG | |
| | TKVEIKR | |
| 7 | EIVMTQSPATLSVSPGERATLSCRASQSVSSNLAWYQQKPGQAPRLLIYGS | L7 (A7) |
| | STRATGIPARFSGSGSGTEFTLTISSLQSEDFAVYYCQQYNNWPYTFGQGT | |
| | KLEIKR | |
| 8 | EIVLTQSPATLSLSPGERATLSCRASQSVSSYLAWYQQKPGQAPRLLIYDA | L8 (A8) |
| | SNRATGIPARFSGSGSGTDFTLTISSLEPEDFAVYYCQQRNTWPYTFGQGT | |
| | KLEIKR | |
| 9 | AIQMTQSPSSLSASVGDRVTITCRASQDIRNDLGWYQQKPGKAPKLLIYA | L9 (A9) |
| | ASLLRSGVPSRFSGSGSGTDFTLTISSLQPEDFATYYCLQDNNYPRTFGQG | |
| | TKVEIK | |
| 10 | DIQMTQSPSSLSASVGDRVTITCRASQGISSWLAWYQQKPEKAPKSLIYAA | L10 (A10) |
| | SSLQSGVPSRFSGSGSGTDFTLTISSLQPEDFATYYCQQYNSYPYTFGQGT | |
| | KLEIK | |
| 11 | DIQMTQSPSSLSASVGDSITITCRASQGISSWLAWYQQKPEKAPKSLIYAAS | L11 (A11) |
| | SLQSGVPSRFSGSGSGTDFTLTISSLQPEDFATYYCQQFNSYPYTFGQGTKL | |
| | EIK | |
| 12 | DIQMTQSPSSLSASVGDRVTVTCRSSQGIAHYLAWYQQKPGKVPKVLLY | L12 (A12) |
| | AASTLQSGVPSRFSGSGSGTDFTLTISSLQPEDVATYYCQKYNSAPYTFGQ | |
| | GTKLEIK | |
| 13 | EIVMTQSPATLSVSPGERATLSCRASQSVSSNLAWYQQKPGQAPRLLIYG | L13 (A13) |
| | ASTRATGIPARFSGSGSGTEFTLTISSLQSEDFAVYYCQQYNNWPFTFGPG | |
| | TKVDIK | |
| 14 | DIQMTQSPSSLSASVGDRVTITCRASQGIRNDLGWYQQKPGKAPKRLIYV | L14 (A14) |
| | ASSLQSGVPSRFSGSGSGTEFTLTISSLQPEDFATYYCLQHNSYPLTFGGGT | |
| | KVEIK | |
| 15 | DIQMTQSPSTLSASVGDRVTITCRASQTISSWLAWYQQKPGTAPKLLIYKA | L15 (A15) |
| | SSLESGVPSRFSGSGSGTEFTLTISSLQPDDFATYYCQQYNSYSYTFGQGTK | |
| | LEIK | |
| 16 | DIQMTQSPSSLSASVGDRVTITCRTSQDIRNDLGWYQQKPGKAPKRLIYA | L16 (A16) |
| | VSSLQSGVPSRFSGSGSGTEFTFTISSLQPEDFATYYCLQYNTYPFTFGPGT | |
| | TVDIK | |
| 17 | DIQMTQSPSSLSASVGDRVTITCRASQGIRNDLGWYQQKPGKAPKRLIYA | L17 (A10) |
| | ASSLQSGVPSRFSGSGSGTEFTLTISSLQPEDFATYYCLQYISYPWTFGQGT | |
| | KVEIK | |
| 18 | AIRMTQSPSSFSASTGDRVTITCRASQGISSYLAWYQQKPGKAPTLLIYAA | L18 (A18) |
| | STLQSGVPSRFSGSGSGTDFTLTISCLQSEDFATYYCQQYYSDPPTFGQGT | |
| | KVEIK | |
| 19 | DIQMTQSPSSLSASVGDRVTITCRASQGIRNDLGWYQQKPGKAPKRLIYA | L19 (A19) |
| | ASSLQSGVPSRFSGSGSGIEFTLTISSLQPEDFATYYCLQYKSYLYTFGQGT | |
| | KLEIK | |
| 20 | DIQLTQSPSFLSASVGDRVTITCRASQGISNYLAWYQQKPGKAPKLLIYAA | L20 (A20) |
| | STLQSGVPSRFSGSGSGIEFTLTISSLQPEDFATYYCHQLNSFPLTFGGGTK | |
| | VEIK | |
| 21 | AIQMTQSPSSLSASVGDRVTITCRASQGIRNELGWYQQKPGKAPKLLICAA | L21 (A21) |
| | SSLQSGVPSRFSGSGSGTDFTLTISSLQPEDFATYYCLQDYIYPYTFGQGTK | |
| | LEIK | |
| 22 | DIQMTQSPSSLSASVGDRVTITCRASQGIRNDLGWYQQKPGKAPKRLIYA | L22 (A22) |
| | ASSLQSGVPSRFSGSGSGTEFTLTISSLQPEDFATYYCLQHNSYPFTFGPGT | |
| | KVEIK | |
| 23 | EIVMTQSPATLSVSPGERATLSCRASQSVSSNLAWYQQKPGQAPRLLIYG | L23 (A23) |
| | ASTRATGIPARFSGSGSGTEFTLTISSLQSEDFAVYYCQQYHNWPLTFGGG | |
| | TKVEIK | |
| 24 | EIVMTQSPATLSVFPGERATLSCRASQSVSSNLGWYQQKPGQAPRLLMYG | L24 (A24) |
| | ASTRVTGIPARFSGSGSGTEFTLTISSLQSEDFAVYYCQQYNTWPRTFGQG | |
| | TKVEIK | |
| 25 | EIVLTQSPATLSLSPGERATLSCRASQSVSSYLAWYQQKPGQAPRLLIYDA | L25 (A25) |
| | SNRATGIPARFSGSGSGTDFTLTISSLEPEDFAVYYCQQRNNWPYTFGQGT | |
| | KLEIK | |
| 26 | DIQMTQSPSSLSASVGDRVTISCRASQGISNYLAWYQQKPGKVPKVLIYG | L26 (A26) |
| | ASTLQSGVPSRFSGSGSGTDFTLTISSLQPEDVATYYCQKYNSAPYTFGQG | |
| | TKLEIK | |
| 27 | AIQLTQSPSSLSASVGDRVTITCRASQGISSALAWYQQKPGKAPKLLIYDA | L27 (A27) |
| | SSLESGVPSRFSGSGSGTDFTLTISSLQPEDFATYYCQQFNDYALTFGGGT | |
| | KVEIK | |
| 28 | AIQMTQSPSSLSASVGDRVTITCRASQGISSALAWYQQKPGKAPKLLIYAA | L28 (A28) |
| | STLQSGVPSRFSGSGSGTDFTLTISSLQPEDFATYYCLQDYNYPWTFGQGT | |
| | KVEIK | |
| 101 | QVQLVESGGGVVQPGRSLRLSCAASGFTFSNYGMHWVRQAPGKGLEWV | H1 (A1) |
| | AVIWYDGSNKYYTDSVKGRFTISRDNSKNTLYLQMNSLRAEDTAVYYCA | |
| | GGGNYYGDYWGQGTLVTVSSAKTT | |
| 102 | QVQLVESGGGVVQPGRSLRLSCAASGFTFSSYGMHWVRQAPGKGLEWV | H2 (A2) |
| | ALISYDGSNKYYADSVKGRFTISRDNSKNTLYLQMNSLRAEDTAVYYCA | |
| | RGGYFDPYGDYYYGMDVWGQGTTVTVSSAKTT | |
| 103 | QVQLVESGGGEVQPGRSLRLSCAASGFTFSDYGMHWVRQAPGKGLEWV | H3 (A3) |
| | AVIWYDGSNKYYADSVKGRFTISRDNSKNTLYLQMNSLRAEDTAVYYCA | |
| | GGGSYWGDYWGQGTLVTVSSAKTT | |
| 104 | QVQLVQSGAEVKKPGASVKVSCKASGYTFATYGVSWVRQAPGQGLEW | H4 (A4) |
| | MGWISAYSDNINYAQNLQGRVTITTDTSTSTAYMELRSLRSDDTAVYYC | |
| | ARDGSHGDYYYGMDVWGQGTTVTVSSAKTT | |
| 105 | QVQLVESGGGVVQPGRSLRLSCAASGFTFSNYGTHWVRQAPGKGLEWV | H5 (A5) |
| | AVIWYDGSNKYYADSVKGRFTISRDNSKNTLYLQMNSLRAEDTAVYYCA | |
| | RDRIYCSSTRCIGFGYYYYGMDVWGQGTTVTVSSAKTT | |
| 106 | QVQLVESGGGVVQPGRSLRLSCAASGFTFSSYGMHWVRQAPGKGLEWV | H6 (A6) |
| | AVIWYDGSNKYYADSVKGRFTISRDNSKNTLYLQMNSLRAEDTAVYYCA | |
| | GGGNYWGDFWGQGTLVTVSSAKTT | |
| 107 | QVQLVQSGAEVKKPGASVKVSCKASGYTFTSYGINWVRQAPGQGLEWM | H7 (A7) |
| | GWISAYNGNRNYAQNLQGRVTMTSDTSTNTAYMELRSLRSYDTAVYYC | |
| | ARDHYDILTGYYKGGFDYWGQGTLVTVSSAKTT | |
| 108 | QVQLVESGGGVVQPGRSLRLSCAASGFTFSSYGMHWVRQAPGKGLEWV | H8 (A8) |
| | AVIWYDGSIKYYADSVKGRFTISRDNSKNTLYLQMNSLRAEDTAVYYCA | |
| | NDILTGSFDYWGQGTLVTVSSAKTT | |
| 109 | QVQLVESGGGVVQPGRSLRLSCAASGFTFSNYGMHWVRQAPGKGLEWV | H9 (A9) |
| | AVIWYDGTNKFYADSVKGRFTISRDNSKNTLYLQMNSLRAEDTAVYYCA | |
| | TNSDDYWGQGTLVTVSSA | |
| 110 | QVQLVQSGAEVKKPGASVKVSCKASGYTFAIYGISWVRQAPGQGLEWM | H10 (A10) |
| | GWISAYSDNSNYAQKLQGRVTMTTDTSTSTAYMELRSLRSDDTAVYYCV | |
| | RDGSHGDYYYGMDVWGQGTTVTVSSA | |
| 111 | QVQLVQSGAEVKKPGASVKVSCRASGYTFTNYGISWVRQAPGQGLEWM | H11 (A11) |
| | GWISVYSDNTHYPQKLQGRVTMTTDTSTSTAYMELRSLRSDDTAVYYCA | |
| | RDGSHGDYYYVMDLWGQGTTVTVSSA | |
| 112 | QVQLVESGGGVVQPGRSLRLSCAASGFTFSSYGMHWVRQAPGKGLEWV | H12 (A12) |
| | AVIWYDGSNKYYADSVKGRFTISRDNSKNTLYLQMNSLRAEDSAVYYCV | |
| | CNPFDYWGQGTLVTVSSA | |
| 113 | QVQLVQSGAEVKKPGASVKVSCKASGYTFTTYGISWVRQAPGQGLEWM | H13 (A13) |
| | GWISAHNGNTNYAQKFQGRVTMTTDTSTSTAYMELRSLRSDDTAVYYC | |
| | VRDGAVADYYYGMDVWGQGTTVTVSSA | |
| 114 | EVQLVESGGGLVQPGGSLRLSCAASGFTFSSYAMSWVRQAPGKGLEWVS | H14 (A14) |
| | AISGSGGSTYYADSVKGRFTISRDNSKNTLYLQMNSLRAEDTAVYYCAK | |
| | DQWYYFVYWGQGTLVTVSSA | |
| 115 | QVQLQESGPGLVKPSETLSLTCTVSGGSISSYYWSWIRQPPGKGLEWIGYI | H15 (A15) |
| | YYSGSTNYNPSLKSRVTISEDTSKNQFSLKLSSVTAADTAVYYCARDEGA | |
| | TFFDYWGQGTLVTVSSA | |
| 116 | QVQLVESGGGVVQPGRSLTLSCAASGFTFSNYGMYWVRQAPGKGLEWV | H16 (A16) |
| | AVIWYDGSNKYYADSVKGRFTISRDNSKNTLYLQMNSLRAEDTAVYYCA | |
| | GGGSYSGDYWGQGTLVTVSSA | |
| 117 | QVQLVESGGGVVQPGRSLRLSCAASGFTFSSYGMHWVRQAPGKGLEWV | H17 (A17) |
| | AVIWYDGSNQYYADSVKGRFTISRDNSKNTLFLQMNSLRAEDTAVYFCA | |
| | GGGNYYGDFWGQGTLVTVSSA | |
| 118 | QVQLVQSGTEVKKPGASVKVSCQASGYTFTSYDISWVRRAPGQGLEWM | H18 (A18) |
| | GWISAYNGNTNYAQKLQGRVTLTTDTSTSTAYMELRSLRSDDTAVYYCA | |
| | RRYYDILTEGGYYYVLDVWGQGTTVTVSSA | |
| 119 | QVQLVESGGGVVQPGRSLRLSCAASGFTFSNYGMYWVRQAPGKGLEWV | H19 (A19) |
| | AVIWYDGSNKYYADSVKGRFTISRDNSKNTLYLQMNSLRAEDTAVYYCA | |
| | GGGDILTGDYWGQGTLVTVSSA | |
| 120 | EVQLVESGGGLVQPGGSLRLSCAASGFTFSFYDMHWVRQAKGKGLEWV | H20 (A20) |
| | SAIGTAGDTYYPGSVKGRFTISRENAKNSLYLQMNSLRAGDTAVYYCAR | |
| | GYCSTTNCFADYFDYWGQGTLVTVSSA | |
| 121 | QVQLVQSGAEVKKPGASVKVSCKASGYTFTSYYMHWVRQAPGQGLEW | H21 (A21) |
| | MGIINPSGSSTSYAQKFQGRVTMTRDTSTSTVYMELSSLRSEDTAVYYCA | |
| | RYGVWGSYRSLDYWGQGTLVTVSSA | |
| 122 | QVQLVESGGGVVQPGRSLRLSCAASGFTFSNYGMHWVRQAPGKGLEWV | H22 (A22) |
| | AVIWYDGSNKYYADSVKGRFTISRDNSKNTLYLQMNSLRAEDTAVYYCA | |
| | RLYYYDSSGYYPDAFDIWGQGTMVTVSSA | |
| 123 | QVQLVESGGGVVQPGRSLRLSCVASGFTFSNYGMHWVRQAPGKGLEWV | H23 (A23) |
| | AIIWYDGSIKYYADSVKGRFTISRDNSKNTLHLQMNSLRAEDTAVYYCAR | |
| | WGIYFDYWGQGTLVTVSSA | |
| 124 | QVQLVESGGGVVQPGRSLRLSCAASGFTFSDSGMHWVRQAPGKGLEWV | H24 (A24) |
| | AVIWYDGSKKYYVDSVKGRFTISRDNSKNTLYLQMNSLRAEDTAVYYCA | |
| | TEGDYWGQGTLVTVSSA | |
| 125 | QVQLVESGGGVVQPGRSLRLSCAASGFTFSSYGMHWVRQAPGKGLEWV | H25 (A25) |
| | GVIWYDGSIKYYADSVKGRFTISRDNSMNTLNLQMNSLRAEDTAVYYCA | |
| | GDILTGSFDYWGQGTLVTVSSA | |
| 126 | QVQLVESGGGVVQPGRSLRLSCAASGFTFSDYGMHWVRQAPGKGLEWV | H26 (A26) |
| | AVIWYDGSNKYYTDSVKGRFTISRDNSKNTLYLQMSSLRAEDAAVYYCA | |
| | VNPFDYWGQGTLVTVSSA | |
| 127 | QVQLVQSGAELVRPGTSVKLSCRASGYTFTTYWMHWVKQRPGQGLEWI | H27 (A27) |
| | GVIDPSDSYTYYNQKFKGKATLTVDTSSSTAYMQLSSLTSEDSAVYFCAR | |
| | NWDYWGQGTTLTVSSA | |
| 128 | QVQLVESGGGLVKPGGSLKLSCAASGFTFSDYGMHWVRQAPEKGLEWV | H28 (A28) |
| | AYISSGSFAIYYADTVRGRFTISRDSAKNTLFLQMTSLRSEDTAMYYCARR | |
| | GPYPYYYSMDYWGQGTSVTVSSA | |
| 1001 | QGIRND | CDR1-L1 (A1) |
| 1002 | QAIRND | CDR1-L2 (A2) |
| 1003 | QGIRNE | CDR1-L3 (A3) |
| 1004 | QGISSW | CDR1-L4 (A4) |
| 1005 | QGISSA | CDR1-L5 (A5) |
| 1006 | QGIRND | CDR1-L6 (A6) |
| 1007 | QSVSSN | CDR1-L7 (A7) |
| 1008 | QSVSSY | CDR1-L8 (A8) |
| 1009 | QDIRND | CDR1-L9 (A9) |
| 1010 | QGISSW | CDR1-L10 (A10) |
| 1011 | QGISSW | CDR1-L11 (A11) |
| 1012 | QGIAHY | CDR1-L12 (A12) |
| 1013 | QSVSSN | CDR1-L13 (A13) |
| 1014 | QGIRND | CDR1-L14 (A14) |
| 1015 | QTISSW | CDR1-L15 (A15) |
| 1016 | QDIRND | CDR1-L16 (A16) |
| 1017 | QGIRND | CDR1-L17 (A17) |
| 1018 | QGISSY | CDR1-L18 (A18) |
| 1019 | QGIRND | CDR1-L19 (A19) |
| 1020 | QGISNY | CDR1-L20 (A20) |
| 1021 | QGIRNE | CDR1-L21 (A21) |
| 1022 | QGIRND | CDR1-L22 (A22) |
| 1023 | QSVSSN | CDR1-L23 (A23) |
| 1024 | QSVSSN | CDR1-L24 (A24) |
| 1025 | QSVSSY | CDR1-L25 (A25) |
| 1026 | QGISNY | CDR1-L26 (A26) |
| 1027 | QGISSA | CDR1-L27 (A27) |
| 1028 | QGISSA | CDR1-L28 (A28) |
| 2001 | VAS | CDR2-L1 (A1) |
| 2002 | AAS | CDR2-L2 (A2) |
| 2003 | AAS | CDR2-L3 (A3) |
| 2004 | AAS | CDR2-L4 (A4) |
| 2005 | DAS | CDR2-L5 (A5) |
| 2006 | AAS | CDR2-L6 (A6) |
| 2007 | GSS | CDR2-L7 (A7) |
| 2008 | DAS | CDR2-L8 (A8) |
| 2009 | AAS | CDR2-L9 (A9) |
| 2010 | AAS | CDR2-L10 (A10) |
| 2011 | AAS | CDR2-L11 (A11) |
| 2012 | AAS | CDR2-L12 (A12) |
| 2013 | GAS | CDR2-L13 (A13) |
| 2014 | VAS | CDR2-L14 (A14) |
| 2015 | KAS | CDR2-L15 (A15) |
| 2016 | AVS | CDR2-L16 (A16) |
| 2017 | AAS | CDR2-L17 (A17) |
| 2018 | AAS | CDR2-L18 (A18) |
| 2019 | AAS | CDR2-L19 (A19) |
| 2020 | AAS | CDR2-L20 (A20) |
| 2021 | AAS | CDR2-L21 (A21) |
| 2022 | AAS | CDR2-L22 (A22) |
| 2023 | GAS | CDR2-L23 (A23) |
| 2024 | GAS | CDR2-L24 (A24) |
| 2025 | DAS | CDR2-L25 (A25) |
| 2026 | GAS | CDR2-L26 (A26) |
| 2027 | DAS | CDR2-L27 (A27) |
| 2028 | AAS | CDR2-L28 (A28) |
| 3001 | LQHNSYPLT | CDR3-L1 (A1) |
| 3002 | LQHNSFPWT | CDR3-L2 (A2) |
| 3003 | LQHYIYPWT | CDR3-L3 (A3) |
| 3004 | QQYNSYPYT | CDR3-L4 (A4) |
| 3005 | QQFNNYPWT | CDR3-L5 (A5) |
| 3006 | LQHNSYPWT | CDR3-L6 (A6) |
| 3007 | QQYNNWPYT | CDR3-L7 (A7) |
| 3008 | QQRNTWPYT | CDR3-L8 (A8) |
| 3009 | LQDNNYPRT | CDR3-L9 (A9) |
| 3010 | QQYNSYPYT | CDR3-L10 (A10) |
| 3011 | QQFNSYPYT | CDR3-L11 (A11) |
| 3012 | QKYNSAPYT | CDR3-L12 (A12) |
| 3013 | QQYNNWPFT | CDR3-L13 (A13) |
| 3014 | LQHNSYPLT | CDR3-L14 (A14) |
| 3015 | QQYNSYSYT | CDR3-L15 (A15) |
| 3016 | LQYNTYPFT | CDR3-L16 (A16) |
| 3017 | LQYISYPWT | CDR3-L17 (A17) |
| 3018 | QQYYSDPPT | CDR3-L18 (A18) |
| 3019 | LQYKSYLYT | CDR3-L19 (A19) |
| 3020 | HQLNSFPLT | CDR3-L20 (A20) |
| 3021 | LQDYIYPYT | CDR3-L21 (A21) |
| 3022 | LQHNSYPFT | CDR3-L22 (A22) |
| 3023 | QQYHNWPLT | CDR3-L23 (A23) |
| 3024 | QQYNTWPRT | CDR3-L24 (A24) |
| 3025 | QQRNNWPYT | CDR3-L25 (A25) |
| 3026 | QKYNSAPYT | CDR3-L26 (A26) |
| 3027 | QQFNDYALT | CDR3-L27 (A27) |
| 3028 | LQDYNYPWT | CDR3-L28 (A28) |
| 4001 | GFTFSNYG | CDR1-H1 (A1) |
| 4002 | GFTFSSYG | CDR1-H2 (A2) |
| 4003 | GFTFSDYG | CDR1-H3 (A3) |
| 4004 | GYTFATYG | CDR1-H4 (A4) |
| 4005 | GFTFSNYG | CDR1-H5 (A5) |
| 4006 | GFTFSSYG | CDR1-H6 (A6) |
| 4007 | GYTFTSYG | CDR1-H7 (A7) |
| 4008 | GFTFSSYG | CDR1-H8 (A8) |
| 4009 | GFTFSNYG | CDR1-H9 (A9) |
| 4010 | GYTFAIYG | CDR1-H10 (A10) |
| 4011 | GYTFTNYG | CDR1-H11 (A11) |
| 4012 | GFTFSSYG | CDR1-H12 (A12) |
| 4013 | GYTFTTYG | CDR1-H13 (A13) |
| 4014 | GFTFSSYA | CDR1-H14 (A14) |
| 4015 | GGSISSYY | CDR1-H15 (A15) |
| 4016 | GFTFSNYG | CDR1-H16 (A16) |
| 4017 | GFTFSSYG | CDR1-H17 (A17) |
| 4018 | GYTFTSYD | CDR1-H18 (A18) |
| 4019 | GFTFSNYG | CDR1-H19 (A19) |
| 4020 | GFTFSFYD | CDR1-H20 (A20) |
| 4021 | GYTFTSYY | CDR1-H21 (A21) |
| 4022 | GFTFSNYG | CDR1-H22 (A22) |
| 4023 | GFTFSNYG | CDR1-H23 (A23) |
| 4024 | GFTFSDSG | CDR1-H24 (A24) |
| 4025 | GFTFSSYG | CDR1-H25 (A25) |
| 4026 | GFTFSDYG | CDR1-H26 (A26) |
| 4027 | GYTFTTYW | CDR1-H27 (A27) |
| 4028 | GFTFSDYG | CDR1-H28 (A28) |
| 5001 | IWYDGSNK | CDR2-H1 (A1) |
| 5002 | ISYDGSNK | CDR2-H2 (A2) |
| 5003 | IWYDGSNK | CDR2-H3 (A3) |
| 5004 | ISAYSDNI | CDR2-H4 (A4) |
| 5005 | IWYDGSNK | CDR2-H5 (A5) |
| 5006 | IWYDGSNK | CDR2-H6 (A6) |
| 5007 | ISAYNGNR | CDR2-H7 (A7) |
| 5008 | IWYDGSIK | CDR2-H8 (A8) |
| 5009 | IWYDGTNK | CDR2-H9 (A9) |
| 5010 | ISAYSDNS | CDR2-H10 (A10) |
| 5011 | ISVYSDNT | CDR2-H11 (A11) |
| 5012 | IWYDGSNK | CDR2-H12 (A12) |
| 5013 | ISAHNGNT | CDR2-H13 (A13) |
| 5014 | ISGSGGST | CDR2-H14 (A14) |
| 5015 | IYYSGST | CDR2-H15 (A15) |
| 5016 | IWYDGSNK | CDR2-H16 (A16) |
| 5017 | IWYDGSNQ | CDR2-H17 (A17) |
| 5018 | ISAYNGNT | CDR2-H18 (A18) |
| 5019 | IWYDGSNK | CDR2-H19 (A19) |
| 5020 | IGTAGDT | CDR2-H20 (A20) |
| 5021 | INPSGSST | CDR2-H21 (A21) |
| 5022 | IWYDGSNK | CDR2-H22 (A22) |
| 5023 | IWYDGSIK | CDR2-H23 (A23) |
| 5024 | IWYDGSKK | CDR2-H24 (A24) |
| 5025 | IWYDGSIK | CDR2-H25 (A25) |
| 5026 | IWYDGSNK | CDR2-H26 (A26) |
| 5027 | IDPSDSYT | CDR2-H27 (A27) |
| 5028 | ISSGSFAI | CDR2-H28 (A28) |
| 6001 | AGGGNYYGDY | CDR3-H1 (A1) |
| 6002 | ARGGYFDPYGDYYYGMDV | CDR3-H2 (A2) |
| 6003 | AGGGSYWGDY | CDR3-H3 (A3) |
| 6004 | ARDGSHGDYYYGMDV | CDR3-H4 (A4) |
| 6005 | ARDRIYCSSTRCIGFGYYYYGMDV | CDR3-H5 (A5) |
| 6006 | AGGGNYWGDF | CDR3-H6 (A6) |
| 6007 | ARDHYDILTGYYKGGFDY | CDR3-H7 (A7) |
| 6008 | ANDILTGSFDY | CDR3-H8 (A8) |
| 6009 | ATNSDDY | CDR3-H9 (A9) |
| 6010 | VRDGSHGDYYYGMDV | CDR3-H10 (A10) |
| 6011 | ARDGSHGDYYYVMDL | CDR3-H11 (A11) |
| 6012 | VCNPFDY | CDR3-H12 (A12) |
| 6013 | VRDGAVADYYYGMDV | CDR3-H13 (A13) |
| 6014 | AKDQWYYFVY | CDR3-H14 (A14) |
| 6015 | ARDEGATFFDY | CDR3-H15 (A15) |
| 6016 | AGGGSYSGDY | CDR3-H16 (A16) |
| 6017 | AGGGNYYGDF | CDR3-H17 (A17) |
| 6018 | ARRYYDILTEGGYYYVLDV | CDR3-H18 (A18) |
| 6019 | AGGGDILTGDY | CDR3-H19 (A19) |
| 6020 | ARGYCSTTNCFADYFDY | CDR3-H20 (A20) |
| 6021 | ARYGVWGSYRSLDY | CDR3-H21 (A21) |
| 6022 | ARLYYYD S SGYYPDAFDI | CDR3-H22 (A22) |
| 6023 | ARWGIYFDY | CDR3-H23 (A23) |
| 6024 | ATEGDY | CDR3-H24 (A24) |
| 6025 | AGDILTGSFDY | CDR3-H25 (A25) |
| 6026 | AVNPFDY | CDR3-H26 (A26) |
| 6027 | ARNWDY | CDR3-H27 (A27) |
| 6028 | ARRGPYPYYYSMDY | CDR3-H28 (A28) |
| 7001 | MQIPQAPWPVVWAVLQLGWRPGWFLDSPDRPWNPPTFSPALLVVTEGD | PD-1 |
| | NATFTCSFSNTSESFVLNWYRMSPSNQTDKLAAFPEDRSQPGQDCRFRVT | |
| | QLPNGRDFHMSVVRARRNDSGTYLCGAISLAPKAQIKESLRAELRVTERR | |
| | AEVPTAHPSPSPRPAGQFQTLVVGVVGGLLGSLVLLVWVLAVICSRAARG | |
| | TIGARRTGQPLKEDPSAVPVFSVDYGELDFQWREKTPEPPVPCVPEQTEY | |
| | ATIVFPSGMGTSSPARRGSADGPRSAQPLRPEDGHCSWPL | |

### Table 10 Provides the Sequence Identifiers for the Light Chain, Heavy Chain, and CDRs of the Indicated Clones

TABLE 10

| Antibody | SEQ ID NO | | | | | | | |
|---|---|---|---|---|---|---|---|---|
| Clone | Light | Heavy | CDR1 | CDR2 | CDR3 | CDR1 | CDR2 | CDR3 |
| Number | Chain | Chain | (Light) | (Light) | (Light) | (Heavy) | (Heavy) | (Heavy) |
| 1 | 8000 | 8523 | 9046 | 9569 | 10092 | 10615 | 11138 | 11661 |
| 2 | 8001 | 8524 | 9047 | 9570 | 10093 | 10616 | 11139 | 11662 |
| 3 | 8002 | 8525 | 9048 | 9571 | 10094 | 10617 | 11140 | 11663 |
| 4 | 8003 | 8526 | 9049 | 9572 | 10095 | 10618 | 11141 | 11664 |
| 5 | 8004 | 8527 | 9050 | 9573 | 10096 | 10619 | 11142 | 11665 |
| 6 | 8005 | 8528 | 9051 | 9574 | 10097 | 10620 | 11143 | 11666 |
| 7 | 8006 | 8529 | 9052 | 9575 | 10098 | 10621 | 11144 | 11667 |
| 8 | 8007 | 8530 | 9053 | 9576 | 10099 | 10622 | 11145 | 11668 |
| 9 | 8008 | 8531 | 9054 | 9577 | 10100 | 10623 | 11146 | 11669 |
| 10 | 8009 | 8532 | 9055 | 9578 | 10101 | 10624 | 11147 | 11670 |
| 11 | 8010 | 8533 | 9056 | 9579 | 10102 | 10625 | 11148 | 11671 |
| 12 | 8011 | 8534 | 9057 | 9580 | 10103 | 10626 | 11149 | 11672 |
| 13 | 8012 | 8535 | 9058 | 9581 | 10104 | 10627 | 11150 | 11673 |
| 14 | 8013 | 8536 | 9059 | 9582 | 10105 | 10628 | 11151 | 11674 |
| 15 | 8014 | 8537 | 9060 | 9583 | 10106 | 10629 | 11152 | 11675 |
| 16 | 8015 | 8538 | 9061 | 9584 | 10107 | 10630 | 11153 | 11676 |
| 17 | 8016 | 8539 | 9062 | 9585 | 10108 | 10631 | 11154 | 11677 |
| 18 | 8017 | 8540 | 9063 | 9586 | 10109 | 10632 | 11155 | 11678 |
| 19 | 8018 | 8541 | 9064 | 9587 | 10110 | 10633 | 11156 | 11679 |
| 20 | 8019 | 8542 | 9065 | 9588 | 10111 | 10634 | 11157 | 11680 |
| 21 | 8020 | 8543 | 9066 | 9589 | 10112 | 10635 | 11158 | 11681 |
| 22 | 8021 | 8544 | 9067 | 9590 | 10113 | 10636 | 11159 | 11682 |
| 23 | 8022 | 8545 | 9068 | 9591 | 10114 | 10637 | 11160 | 11683 |
| 24 | 8023 | 8546 | 9069 | 9592 | 10115 | 10638 | 11161 | 11684 |
| 25 | 8024 | 8547 | 9070 | 9593 | 10116 | 10639 | 11162 | 11685 |
| 26 | 8025 | 8548 | 9071 | 9594 | 10117 | 10640 | 11163 | 11686 |
| 27 | 8026 | 8549 | 9072 | 9595 | 10118 | 10641 | 11164 | 11687 |
| 28 | 8027 | 8550 | 9073 | 9596 | 10119 | 10642 | 11165 | 11688 |
| 29 | 8028 | 8551 | 9074 | 9597 | 10120 | 10643 | 11166 | 11689 |
| 30 | 8029 | 8552 | 9075 | 9598 | 10121 | 10644 | 11167 | 11690 |
| 31 | 8030 | 8553 | 9076 | 9599 | 10122 | 10645 | 11168 | 11691 |
| 32 | 8031 | 8554 | 9077 | 9600 | 10123 | 10646 | 11169 | 11692 |
| 33 | 8032 | 8555 | 9078 | 9601 | 10124 | 10647 | 11170 | 11693 |
| 34 | 8033 | 8556 | 9079 | 9602 | 10125 | 10648 | 11171 | 11694 |
| 35 | 8034 | 8557 | 9080 | 9603 | 10126 | 10649 | 11172 | 11695 |
| 36 | 8035 | 8558 | 9081 | 9604 | 10127 | 10650 | 11173 | 11696 |
| 37 | 8036 | 8559 | 9082 | 9605 | 10128 | 10651 | 11174 | 11697 |
| 38 | 8037 | 8560 | 9083 | 9606 | 10129 | 10652 | 11175 | 11698 |
| 39 | 8038 | 8561 | 9084 | 9607 | 10130 | 10653 | 11176 | 11699 |
| 40 | 8039 | 8562 | 9085 | 9608 | 10131 | 10654 | 11177 | 11700 |
| 41 | 8040 | 8563 | 9086 | 9609 | 10132 | 10655 | 11178 | 11701 |
| 42 | 8041 | 8564 | 9087 | 9610 | 10133 | 10656 | 11179 | 11702 |
| 43 | 8042 | 8565 | 9088 | 9611 | 10134 | 10657 | 11180 | 11703 |
| 44 | 8043 | 8566 | 9089 | 9612 | 10135 | 10658 | 11181 | 11704 |
| 45 | 8044 | 8567 | 9090 | 9613 | 10136 | 10659 | 11182 | 11705 |
| 46 | 8045 | 8568 | 9091 | 9614 | 10137 | 10660 | 11183 | 11706 |
| 47 | 8046 | 8569 | 9092 | 9615 | 10138 | 10661 | 11184 | 11707 |
| 48 | 8047 | 8570 | 9093 | 9616 | 10139 | 10662 | 11185 | 11708 |
| 49 | 8048 | 8571 | 9094 | 9617 | 10140 | 10663 | 11186 | 11709 |
| 50 | 8049 | 8572 | 9095 | 9618 | 10141 | 10664 | 11187 | 11710 |
| 51 | 8050 | 8573 | 9096 | 9619 | 10142 | 10665 | 11188 | 11711 |
| 52 | 8051 | 8574 | 9097 | 9620 | 10143 | 10666 | 11189 | 11712 |
| 53 | 8052 | 8575 | 9098 | 9621 | 10144 | 10667 | 11190 | 11713 |
| 54 | 8053 | 8576 | 9099 | 9622 | 10145 | 10668 | 11191 | 11714 |
| 55 | 8054 | 8577 | 9100 | 9623 | 10146 | 10669 | 11192 | 11715 |
| 56 | 8055 | 8578 | 9101 | 9624 | 10147 | 10670 | 11193 | 11716 |
| 57 | 8056 | 8579 | 9102 | 9625 | 10148 | 10671 | 11194 | 11717 |
| 58 | 8057 | 8580 | 9103 | 9626 | 10149 | 10672 | 11195 | 11718 |
| 59 | 8058 | 8581 | 9104 | 9627 | 10150 | 10673 | 11196 | 11719 |
| 60 | 8059 | 8582 | 9105 | 9628 | 10151 | 10674 | 11197 | 11720 |
| 61 | 8060 | 8583 | 9106 | 9629 | 10152 | 10675 | 11198 | 11721 |
| 62 | 8061 | 8584 | 9107 | 9630 | 10153 | 10676 | 11199 | 11722 |
| 63 | 8062 | 8585 | 9108 | 9631 | 10154 | 10677 | 11200 | 11723 |
| 64 | 8063 | 8586 | 9109 | 9632 | 10155 | 10678 | 11201 | 11724 |
| 65 | 8064 | 8587 | 9110 | 9633 | 10156 | 10679 | 11202 | 11725 |
| 66 | 8065 | 8588 | 9111 | 9634 | 10157 | 10680 | 11203 | 11726 |
| 67 | 8066 | 8589 | 9112 | 9635 | 10158 | 10681 | 11204 | 11727 |
| 68 | 8067 | 8590 | 9113 | 9636 | 10159 | 10682 | 11205 | 11728 |
| 69 | 8068 | 8591 | 9114 | 9637 | 10160 | 10683 | 11206 | 11729 |
| 70 | 8069 | 8592 | 9115 | 9638 | 10161 | 10684 | 11207 | 11730 |
| 71 | 8070 | 8593 | 9116 | 9639 | 10162 | 10685 | 11208 | 11731 |
| 72 | 8071 | 8594 | 9117 | 9640 | 10163 | 10686 | 11209 | 11732 |
| 73 | 8072 | 8595 | 9118 | 9641 | 10164 | 10687 | 11210 | 11733 |
| 74 | 8073 | 8596 | 9119 | 9642 | 10165 | 10688 | 11211 | 11734 |
| 75 | 8074 | 8597 | 9120 | 9643 | 10166 | 10689 | 11212 | 11735 |
| 76 | 8075 | 8598 | 9121 | 9644 | 10167 | 10690 | 11213 | 11736 |
| 77 | 8076 | 8599 | 9122 | 9645 | 10168 | 10691 | 11214 | 11737 |
| 78 | 8077 | 8600 | 9123 | 9646 | 10169 | 10692 | 11215 | 11738 |
| 79 | 8078 | 8601 | 9124 | 9647 | 10170 | 10693 | 11216 | 11739 |
| 80 | 8079 | 8602 | 9125 | 9648 | 10171 | 10694 | 11217 | 11740 |
| 81 | 8080 | 8603 | 9126 | 9649 | 10172 | 10695 | 11218 | 11741 |
| 82 | 8081 | 8604 | 9127 | 9650 | 10173 | 10696 | 11219 | 11742 |
| 83 | 8082 | 8605 | 9128 | 9651 | 10174 | 10697 | 11220 | 11743 |
| 84 | 8083 | 8606 | 9129 | 9652 | 10175 | 10698 | 11221 | 11744 |
| 85 | 8084 | 8607 | 9130 | 9653 | 10176 | 10699 | 11222 | 11745 |
| 86 | 8085 | 8608 | 9131 | 9654 | 10177 | 10700 | 11223 | 11746 |
| 87 | 8086 | 8609 | 9132 | 9655 | 10178 | 10701 | 11224 | 11747 |
| 88 | 8087 | 8610 | 9133 | 9656 | 10179 | 10702 | 11225 | 11748 |
| 89 | 8088 | 8611 | 9134 | 9657 | 10180 | 10703 | 11226 | 11749 |
| 90 | 8089 | 8612 | 9135 | 9658 | 10181 | 10704 | 11227 | 11750 |
| 91 | 8090 | 8613 | 9136 | 9659 | 10182 | 10705 | 11228 | 11751 |
| 92 | 8091 | 8614 | 9137 | 9660 | 10183 | 10706 | 11229 | 11752 |
| 93 | 8092 | 8615 | 9138 | 9661 | 10184 | 10707 | 11230 | 11753 |
| 94 | 8093 | 8616 | 9139 | 9662 | 10185 | 10708 | 11231 | 11754 |
| 95 | 8094 | 8617 | 9140 | 9663 | 10186 | 10709 | 11232 | 11755 |
| 96 | 8095 | 8618 | 9141 | 9664 | 10187 | 10710 | 11233 | 11756 |
| 97 | 8096 | 8619 | 9142 | 9665 | 10188 | 10711 | 11234 | 11757 |
| 98 | 8097 | 8620 | 9143 | 9666 | 10189 | 10712 | 11235 | 11758 |
| 99 | 8098 | 8621 | 9144 | 9667 | 10190 | 10713 | 11236 | 11759 |
| 100 | 8099 | 8622 | 9145 | 9668 | 10191 | 10714 | 11237 | 11760 |
| 101 | 8100 | 8623 | 9146 | 9669 | 10192 | 10715 | 11238 | 11761 |
| 102 | 8101 | 8624 | 9147 | 9670 | 10193 | 10716 | 11239 | 11762 |
| 103 | 8102 | 8625 | 9148 | 9671 | 10194 | 10717 | 11240 | 11763 |
| 104 | 8103 | 8626 | 9149 | 9672 | 10195 | 10718 | 11241 | 11764 |
| 105 | 8104 | 8627 | 9150 | 9673 | 10196 | 10719 | 11242 | 11765 |
| 106 | 8105 | 8628 | 9151 | 9674 | 10197 | 10720 | 11243 | 11766 |
| 107 | 8106 | 8629 | 9152 | 9675 | 10198 | 10721 | 11244 | 11767 |
| 108 | 8107 | 8630 | 9153 | 9676 | 10199 | 10722 | 11245 | 11768 |
| 109 | 8108 | 8631 | 9154 | 9677 | 10200 | 10723 | 11246 | 11769 |
| 110 | 8109 | 8632 | 9155 | 9678 | 10201 | 10724 | 11247 | 11770 |
| 111 | 8110 | 8633 | 9156 | 9679 | 10202 | 10725 | 11248 | 11771 |
| 112 | 8111 | 8634 | 9157 | 9680 | 10203 | 10726 | 11249 | 11772 |
| 113 | 8112 | 8635 | 9158 | 9681 | 10204 | 10727 | 11250 | 11773 |
| 114 | 8113 | 8636 | 9159 | 9682 | 10205 | 10728 | 11251 | 11774 |
| 115 | 8114 | 8637 | 9160 | 9683 | 10206 | 10729 | 11252 | 11775 |
| 116 | 8115 | 8638 | 9161 | 9684 | 10207 | 10730 | 11253 | 11776 |
| 117 | 8116 | 8639 | 9162 | 9685 | 10208 | 10731 | 11254 | 11777 |
| 118 | 8117 | 8640 | 9163 | 9686 | 10209 | 10732 | 11255 | 11778 |
| 119 | 8118 | 8641 | 9164 | 9687 | 10210 | 10733 | 11256 | 11779 |
| 120 | 8119 | 8642 | 9165 | 9688 | 10211 | 10734 | 11257 | 11780 |
| 121 | 8120 | 8643 | 9166 | 9689 | 10212 | 10735 | 11258 | 11781 |
| 122 | 8121 | 8644 | 9167 | 9690 | 10213 | 10736 | 11259 | 11782 |
| 123 | 8122 | 8645 | 9168 | 9691 | 10214 | 10737 | 11260 | 11783 |
| 124 | 8123 | 8646 | 9169 | 9692 | 10215 | 10738 | 11261 | 11784 |
| 125 | 8124 | 8647 | 9170 | 9693 | 10216 | 10739 | 11262 | 11785 |
| 126 | 8125 | 8648 | 9171 | 9694 | 10217 | 10740 | 11263 | 11786 |
| 127 | 8126 | 8649 | 9172 | 9695 | 10218 | 10741 | 11264 | 11787 |
| 128 | 8127 | 8650 | 9173 | 9696 | 10219 | 10742 | 11265 | 11788 |
| 129 | 8128 | 8651 | 9174 | 9697 | 10220 | 10743 | 11266 | 11789 |
| 130 | 8129 | 8652 | 9175 | 9698 | 10221 | 10744 | 11267 | 11790 |
| 131 | 8130 | 8653 | 9176 | 9699 | 10222 | 10745 | 11268 | 11791 |
| 132 | 8131 | 8654 | 9177 | 9700 | 10223 | 10746 | 11269 | 11792 |
| 133 | 8132 | 8655 | 9178 | 9701 | 10224 | 10747 | 11270 | 11793 |
| 134 | 8133 | 8656 | 9179 | 9702 | 10225 | 10748 | 11271 | 11794 |
| 135 | 8134 | 8657 | 9180 | 9703 | 10226 | 10749 | 11272 | 11795 |
| 136 | 8135 | 8658 | 9181 | 9704 | 10227 | 10750 | 11273 | 11796 |
| 137 | 8136 | 8659 | 9182 | 9705 | 10228 | 10751 | 11274 | 11797 |
| 138 | 8137 | 8660 | 9183 | 9706 | 10229 | 10752 | 11275 | 11798 |
| 139 | 8138 | 8661 | 9184 | 9707 | 10230 | 10753 | 11276 | 11799 |
| 140 | 8139 | 8662 | 9185 | 9708 | 10231 | 10754 | 11277 | 11800 |
| 141 | 8140 | 8663 | 9186 | 9709 | 10232 | 10755 | 11278 | 11801 |
| 142 | 8141 | 8664 | 9187 | 9710 | 10233 | 10756 | 11279 | 11802 |
| 143 | 8142 | 8665 | 9188 | 9711 | 10234 | 10757 | 11280 | 11803 |
| 144 | 8143 | 8666 | 9189 | 9712 | 10235 | 10758 | 11281 | 11804 |
| 145 | 8144 | 8667 | 9190 | 9713 | 10236 | 10759 | 11282 | 11805 |
| 146 | 8145 | 8668 | 9191 | 9714 | 10237 | 10760 | 11283 | 11806 |
| 147 | 8146 | 8669 | 9192 | 9715 | 10238 | 10761 | 11284 | 11807 |
| 148 | 8147 | 8670 | 9193 | 9716 | 10239 | 10762 | 11285 | 11808 |
| 149 | 8148 | 8671 | 9194 | 9717 | 10240 | 10763 | 11286 | 11809 |
| 150 | 8149 | 8672 | 9195 | 9718 | 10241 | 10764 | 11287 | 11810 |
| 151 | 8150 | 8673 | 9196 | 9719 | 10242 | 10765 | 11288 | 11811 |
| 152 | 8151 | 8674 | 9197 | 9720 | 10243 | 10766 | 11289 | 11812 |
| 153 | 8152 | 8675 | 9198 | 9721 | 10244 | 10767 | 11290 | 11813 |
| 154 | 8153 | 8676 | 9199 | 9722 | 10245 | 10768 | 11291 | 11814 |
| 155 | 8154 | 8677 | 9200 | 9723 | 10246 | 10769 | 11292 | 11815 |
| 156 | 8155 | 8678 | 9201 | 9724 | 10247 | 10770 | 11293 | 11816 |
| 157 | 8156 | 8679 | 9202 | 9725 | 10248 | 10771 | 11294 | 11817 |
| 158 | 8157 | 8680 | 9203 | 9726 | 10249 | 10772 | 11295 | 11818 |
| 159 | 8158 | 8681 | 9204 | 9727 | 10250 | 10773 | 11296 | 11819 |
| 160 | 8159 | 8682 | 9205 | 9728 | 10251 | 10774 | 11297 | 11820 |
| 161 | 8160 | 8683 | 9206 | 9729 | 10252 | 10775 | 11298 | 11821 |
| 162 | 8161 | 8684 | 9207 | 9730 | 10253 | 10776 | 11299 | 11822 |
| 163 | 8162 | 8685 | 9208 | 9731 | 10254 | 10777 | 11300 | 11823 |
| 164 | 8163 | 8686 | 9209 | 9732 | 10255 | 10778 | 11301 | 11824 |
| 165 | 8164 | 8687 | 9210 | 9733 | 10256 | 10779 | 11302 | 11825 |
| 166 | 8165 | 8688 | 9211 | 9734 | 10257 | 10780 | 11303 | 11826 |
| 167 | 8166 | 8689 | 9212 | 9735 | 10258 | 10781 | 11304 | 11827 |
| 168 | 8167 | 8690 | 9213 | 9736 | 10259 | 10782 | 11305 | 11828 |
| 169 | 8168 | 8691 | 9214 | 9737 | 10260 | 10783 | 11306 | 11829 |
| 170 | 8169 | 8692 | 9215 | 9738 | 10261 | 10784 | 11307 | 11830 |
| 171 | 8170 | 8693 | 9216 | 9739 | 10262 | 10785 | 11308 | 11831 |
| 172 | 8171 | 8694 | 9217 | 9740 | 10263 | 10786 | 11309 | 11832 |
| 173 | 8172 | 8695 | 9218 | 9741 | 10264 | 10787 | 11310 | 11833 |
| 174 | 8173 | 8696 | 9219 | 9742 | 10265 | 10788 | 11311 | 11834 |
| 175 | 8174 | 8697 | 9220 | 9743 | 10266 | 10789 | 11312 | 11835 |
| 176 | 8175 | 8698 | 9221 | 9744 | 10267 | 10790 | 11313 | 11836 |
| 177 | 8176 | 8699 | 9222 | 9745 | 10268 | 10791 | 11314 | 11837 |
| 178 | 8177 | 8700 | 9223 | 9746 | 10269 | 10792 | 11315 | 11838 |
| 179 | 8178 | 8701 | 9224 | 9747 | 10270 | 10793 | 11316 | 11839 |
| 180 | 8179 | 8702 | 9225 | 9748 | 10271 | 10794 | 11317 | 11840 |
| 181 | 8180 | 8703 | 9226 | 9749 | 10272 | 10795 | 11318 | 11841 |
| 182 | 8181 | 8704 | 9227 | 9750 | 10273 | 10796 | 11319 | 11842 |
| 183 | 8182 | 8705 | 9228 | 9751 | 10274 | 10797 | 11320 | 11843 |
| 184 | 8183 | 8706 | 9229 | 9752 | 10275 | 10798 | 11321 | 11844 |
| 185 | 8184 | 8707 | 9230 | 9753 | 10276 | 10799 | 11322 | 11845 |
| 186 | 8185 | 8708 | 9231 | 9754 | 10277 | 10800 | 11323 | 11846 |
| 187 | 8186 | 8709 | 9232 | 9755 | 10278 | 10801 | 11324 | 11847 |
| 188 | 8187 | 8710 | 9233 | 9756 | 10279 | 10802 | 11325 | 11848 |
| 189 | 8188 | 8711 | 9234 | 9757 | 10280 | 10803 | 11326 | 11849 |
| 190 | 8189 | 8712 | 9235 | 9758 | 10281 | 10804 | 11327 | 11850 |
| 191 | 8190 | 8713 | 9236 | 9759 | 10282 | 10805 | 11328 | 11851 |
| 192 | 8191 | 8714 | 9237 | 9760 | 10283 | 10806 | 11329 | 11852 |
| 193 | 8192 | 8715 | 9238 | 9761 | 10284 | 10807 | 11330 | 11853 |
| 194 | 8193 | 8716 | 9239 | 9762 | 10285 | 10808 | 11331 | 11854 |
| 195 | 8194 | 8717 | 9240 | 9763 | 10286 | 10809 | 11332 | 11855 |
| 196 | 8195 | 8718 | 9241 | 9764 | 10287 | 10810 | 11333 | 11856 |
| 197 | 8196 | 8719 | 9242 | 9765 | 10288 | 10811 | 11334 | 11857 |
| 198 | 8197 | 8720 | 9243 | 9766 | 10289 | 10812 | 11335 | 11858 |
| 199 | 8198 | 8721 | 9244 | 9767 | 10290 | 10813 | 11336 | 11859 |
| 200 | 8199 | 8722 | 9245 | 9768 | 10291 | 10814 | 11337 | 11860 |
| 201 | 8200 | 8723 | 9246 | 9769 | 10292 | 10815 | 11338 | 11861 |
| 202 | 8201 | 8724 | 9247 | 9770 | 10293 | 10816 | 11339 | 11862 |
| 203 | 8202 | 8725 | 9248 | 9771 | 10294 | 10817 | 11340 | 11863 |
| 204 | 8203 | 8726 | 9249 | 9772 | 10295 | 10818 | 11341 | 11864 |
| 205 | 8204 | 8727 | 9250 | 9773 | 10296 | 10819 | 11342 | 11865 |
| 206 | 8205 | 8728 | 9251 | 9774 | 10297 | 10820 | 11343 | 11866 |
| 207 | 8206 | 8729 | 9252 | 9775 | 10298 | 10821 | 11344 | 11867 |
| 208 | 8207 | 8730 | 9253 | 9776 | 10299 | 10822 | 11345 | 11868 |
| 209 | 8208 | 8731 | 9254 | 9777 | 10300 | 10823 | 11346 | 11869 |
| 210 | 8209 | 8732 | 9255 | 9778 | 10301 | 10824 | 11347 | 11870 |
| 211 | 8210 | 8733 | 9256 | 9779 | 10302 | 10825 | 11348 | 11871 |
| 212 | 8211 | 8734 | 9257 | 9780 | 10303 | 10826 | 11349 | 11872 |
| 213 | 8212 | 8735 | 9258 | 9781 | 10304 | 10827 | 11350 | 11873 |
| 214 | 8213 | 8736 | 9259 | 9782 | 10305 | 10828 | 11351 | 11874 |
| 215 | 8214 | 8737 | 9260 | 9783 | 10306 | 10829 | 11352 | 11875 |
| 216 | 8215 | 8738 | 9261 | 9784 | 10307 | 10830 | 11353 | 11876 |
| 217 | 8216 | 8739 | 9262 | 9785 | 10308 | 10831 | 11354 | 11877 |
| 218 | 8217 | 8740 | 9263 | 9786 | 10309 | 10832 | 11355 | 11878 |
| 219 | 8218 | 8741 | 9264 | 9787 | 10310 | 10833 | 11356 | 11879 |
| 220 | 8219 | 8742 | 9265 | 9788 | 10311 | 10834 | 11357 | 11880 |
| 221 | 8220 | 8743 | 9266 | 9789 | 10312 | 10835 | 11358 | 11881 |
| 222 | 8221 | 8744 | 9267 | 9790 | 10313 | 10836 | 11359 | 11882 |
| 223 | 8222 | 8745 | 9268 | 9791 | 10314 | 10837 | 11360 | 11883 |
| 224 | 8223 | 8746 | 9269 | 9792 | 10315 | 10838 | 11361 | 11884 |
| 225 | 8224 | 8747 | 9270 | 9793 | 10316 | 10839 | 11362 | 11885 |
| 226 | 8225 | 8748 | 9271 | 9794 | 10317 | 10840 | 11363 | 11886 |
| 227 | 8226 | 8749 | 9272 | 9795 | 10318 | 10841 | 11364 | 11887 |
| 228 | 8227 | 8750 | 9273 | 9796 | 10319 | 10842 | 11365 | 11888 |
| 229 | 8228 | 8751 | 9274 | 9797 | 10320 | 10843 | 11366 | 11889 |
| 230 | 8229 | 8752 | 9275 | 9798 | 10321 | 10844 | 11367 | 11890 |
| 231 | 8230 | 8753 | 9276 | 9799 | 10322 | 10845 | 11368 | 11891 |
| 232 | 8231 | 8754 | 9277 | 9800 | 10323 | 10846 | 11369 | 11892 |
| 233 | 8232 | 8755 | 9278 | 9801 | 10324 | 10847 | 11370 | 11893 |
| 234 | 8233 | 8756 | 9279 | 9802 | 10325 | 10848 | 11371 | 11894 |
| 235 | 8234 | 8757 | 9280 | 9803 | 10326 | 10849 | 11372 | 11895 |
| 236 | 8235 | 8758 | 9281 | 9804 | 10327 | 10850 | 11373 | 11896 |
| 237 | 8236 | 8759 | 9282 | 9805 | 10328 | 10851 | 11374 | 11897 |
| 238 | 8237 | 8760 | 9283 | 9806 | 10329 | 10852 | 11375 | 11898 |
| 239 | 8238 | 8761 | 9284 | 9807 | 10330 | 10853 | 11376 | 11899 |
| 240 | 8239 | 8762 | 9285 | 9808 | 10331 | 10854 | 11377 | 11900 |
| 241 | 8240 | 8763 | 9286 | 9809 | 10332 | 10855 | 11378 | 11901 |
| 242 | 8241 | 8764 | 9287 | 9810 | 10333 | 10856 | 11379 | 11902 |
| 243 | 8242 | 8765 | 9288 | 9811 | 10334 | 10857 | 11380 | 11903 |
| 244 | 8243 | 8766 | 9289 | 9812 | 10335 | 10858 | 11381 | 11904 |
| 245 | 8244 | 8767 | 9290 | 9813 | 10336 | 10859 | 11382 | 11905 |
| 246 | 8245 | 8768 | 9291 | 9814 | 10337 | 10860 | 11383 | 11906 |
| 247 | 8246 | 8769 | 9292 | 9815 | 10338 | 10861 | 11384 | 11907 |
| 248 | 8247 | 8770 | 9293 | 9816 | 10339 | 10862 | 11385 | 11908 |
| 249 | 8248 | 8771 | 9294 | 9817 | 10340 | 10863 | 11386 | 11909 |
| 250 | 8249 | 8772 | 9295 | 9818 | 10341 | 10864 | 11387 | 11910 |
| 251 | 8250 | 8773 | 9296 | 9819 | 10342 | 10865 | 11388 | 11911 |
| 252 | 8251 | 8774 | 9297 | 9820 | 10343 | 10866 | 11389 | 11912 |
| 253 | 8252 | 8775 | 9298 | 9821 | 10344 | 10867 | 11390 | 11913 |
| 254 | 8253 | 8776 | 9299 | 9822 | 10345 | 10868 | 11391 | 11914 |
| 255 | 8254 | 8777 | 9300 | 9823 | 10346 | 10869 | 11392 | 11915 |
| 256 | 8255 | 8778 | 9301 | 9824 | 10347 | 10870 | 11393 | 11916 |
| 257 | 8256 | 8779 | 9302 | 9825 | 10348 | 10871 | 11394 | 11917 |
| 258 | 8257 | 8780 | 9303 | 9826 | 10349 | 10872 | 11395 | 11918 |
| 259 | 8258 | 8781 | 9304 | 9827 | 10350 | 10873 | 11396 | 11919 |
| 260 | 8259 | 8782 | 9305 | 9828 | 10351 | 10874 | 11397 | 11920 |
| 261 | 8260 | 8783 | 9306 | 9829 | 10352 | 10875 | 11398 | 11921 |
| 262 | 8261 | 8784 | 9307 | 9830 | 10353 | 10876 | 11399 | 11922 |
| 263 | 8262 | 8785 | 9308 | 9831 | 10354 | 10877 | 11400 | 11923 |
| 264 | 8263 | 8786 | 9309 | 9832 | 10355 | 10878 | 11401 | 11924 |
| 265 | 8264 | 8787 | 9310 | 9833 | 10356 | 10879 | 11402 | 11925 |
| 266 | 8265 | 8788 | 9311 | 9834 | 10357 | 10880 | 11403 | 11926 |
| 267 | 8266 | 8789 | 9312 | 9835 | 10358 | 10881 | 11404 | 11927 |
| 268 | 8267 | 8790 | 9313 | 9836 | 10359 | 10882 | 11405 | 11928 |
| 269 | 8268 | 8791 | 9314 | 9837 | 10360 | 10883 | 11406 | 11929 |
| 270 | 8269 | 8792 | 9315 | 9838 | 10361 | 10884 | 11407 | 11930 |
| 271 | 8270 | 8793 | 9316 | 9839 | 10362 | 10885 | 11408 | 11931 |
| 272 | 8271 | 8794 | 9317 | 9840 | 10363 | 10886 | 11409 | 11932 |
| 273 | 8272 | 8795 | 9318 | 9841 | 10364 | 10887 | 11410 | 11933 |
| 274 | 8273 | 8796 | 9319 | 9842 | 10365 | 10888 | 11411 | 11934 |
| 275 | 8274 | 8797 | 9320 | 9843 | 10366 | 10889 | 11412 | 11935 |
| 276 | 8275 | 8798 | 9321 | 9844 | 10367 | 10890 | 11413 | 11936 |
| 277 | 8276 | 8799 | 9322 | 9845 | 10368 | 10891 | 11414 | 11937 |
| 278 | 8277 | 8800 | 9323 | 9846 | 10369 | 10892 | 11415 | 11938 |
| 279 | 8278 | 8801 | 9324 | 9847 | 10370 | 10893 | 11416 | 11939 |
| 280 | 8279 | 8802 | 9325 | 9848 | 10371 | 10894 | 11417 | 11940 |
| 281 | 8280 | 8803 | 9326 | 9849 | 10372 | 10895 | 11418 | 11941 |
| 282 | 8281 | 8804 | 9327 | 9850 | 10373 | 10896 | 11419 | 11942 |
| 283 | 8282 | 8805 | 9328 | 9851 | 10374 | 10897 | 11420 | 11943 |
| 284 | 8283 | 8806 | 9329 | 9852 | 10375 | 10898 | 11421 | 11944 |
| 285 | 8284 | 8807 | 9330 | 9853 | 10376 | 10899 | 11422 | 11945 |
| 286 | 8285 | 8808 | 9331 | 9854 | 10377 | 10900 | 11423 | 11946 |
| 287 | 8286 | 8809 | 9332 | 9855 | 10378 | 10901 | 11424 | 11947 |
| 288 | 8287 | 8810 | 9333 | 9856 | 10379 | 10902 | 11425 | 11948 |
| 289 | 8288 | 8811 | 9334 | 9857 | 10380 | 10903 | 11426 | 11949 |
| 290 | 8289 | 8812 | 9335 | 9858 | 10381 | 10904 | 11427 | 11950 |
| 291 | 8290 | 8813 | 9336 | 9859 | 10382 | 10905 | 11428 | 11951 |
| 292 | 8291 | 8814 | 9337 | 9860 | 10383 | 10906 | 11429 | 11952 |
| 293 | 8292 | 8815 | 9338 | 9861 | 10384 | 10907 | 11430 | 11953 |
| 294 | 8293 | 8816 | 9339 | 9862 | 10385 | 10908 | 11431 | 11954 |
| 295 | 8294 | 8817 | 9340 | 9863 | 10386 | 10909 | 11432 | 11955 |
| 296 | 8295 | 8818 | 9341 | 9864 | 10387 | 10910 | 11433 | 11956 |
| 297 | 8296 | 8819 | 9342 | 9865 | 10388 | 10911 | 11434 | 11957 |
| 298 | 8297 | 8820 | 9343 | 9866 | 10389 | 10912 | 11435 | 11958 |
| 299 | 8298 | 8821 | 9344 | 9867 | 10390 | 10913 | 11436 | 11959 |
| 300 | 8299 | 8822 | 9345 | 9868 | 10391 | 10914 | 11437 | 11960 |
| 301 | 8300 | 8823 | 9346 | 9869 | 10392 | 10915 | 11438 | 11961 |
| 302 | 8301 | 8824 | 9347 | 9870 | 10393 | 10916 | 11439 | 11962 |
| 303 | 8302 | 8825 | 9348 | 9871 | 10394 | 10917 | 11440 | 11963 |
| 304 | 8303 | 8826 | 9349 | 9872 | 10395 | 10918 | 11441 | 11964 |
| 305 | 8304 | 8827 | 9350 | 9873 | 10396 | 10919 | 11442 | 11965 |
| 306 | 8305 | 8828 | 9351 | 9874 | 10397 | 10920 | 11443 | 11966 |
| 307 | 8306 | 8829 | 9352 | 9875 | 10398 | 10921 | 11444 | 11967 |
| 308 | 8307 | 8830 | 9353 | 9876 | 10399 | 10922 | 11445 | 11968 |
| 309 | 8308 | 8831 | 9354 | 9877 | 10400 | 10923 | 11446 | 11969 |
| 310 | 8309 | 8832 | 9355 | 9878 | 10401 | 10924 | 11447 | 11970 |
| 311 | 8310 | 8833 | 9356 | 9879 | 10402 | 10925 | 11448 | 11971 |
| 312 | 8311 | 8834 | 9357 | 9880 | 10403 | 10926 | 11449 | 11972 |
| 313 | 8312 | 8835 | 9358 | 9881 | 10404 | 10927 | 11450 | 11973 |
| 314 | 8313 | 8836 | 9359 | 9882 | 10405 | 10928 | 11451 | 11974 |
| 315 | 8314 | 8837 | 9360 | 9883 | 10406 | 10929 | 11452 | 11975 |
| 316 | 8315 | 8838 | 9361 | 9884 | 10407 | 10930 | 11453 | 11976 |
| 317 | 8316 | 8839 | 9362 | 9885 | 10408 | 10931 | 11454 | 11977 |
| 318 | 8317 | 8840 | 9363 | 9886 | 10409 | 10932 | 11455 | 11978 |
| 319 | 8318 | 8841 | 9364 | 9887 | 10410 | 10933 | 11456 | 11979 |
| 320 | 8319 | 8842 | 9365 | 9888 | 10411 | 10934 | 11457 | 11980 |
| 321 | 8320 | 8843 | 9366 | 9889 | 10412 | 10935 | 11458 | 11981 |
| 322 | 8321 | 8844 | 9367 | 9890 | 10413 | 10936 | 11459 | 11982 |
| 323 | 8322 | 8845 | 9368 | 9891 | 10414 | 10937 | 11460 | 11983 |
| 324 | 8323 | 8846 | 9369 | 9892 | 10415 | 10938 | 11461 | 11984 |
| 325 | 8324 | 8847 | 9370 | 9893 | 10416 | 10939 | 11462 | 11985 |
| 326 | 8325 | 8848 | 9371 | 9894 | 10417 | 10940 | 11463 | 11986 |
| 327 | 8326 | 8849 | 9372 | 9895 | 10418 | 10941 | 11464 | 11987 |
| 328 | 8327 | 8850 | 9373 | 9896 | 10419 | 10942 | 11465 | 11988 |
| 329 | 8328 | 8851 | 9374 | 9897 | 10420 | 10943 | 11466 | 11989 |
| 330 | 8329 | 8852 | 9375 | 9898 | 10421 | 10944 | 11467 | 11990 |
| 331 | 8330 | 8853 | 9376 | 9899 | 10422 | 10945 | 11468 | 11991 |
| 332 | 8331 | 8854 | 9377 | 9900 | 10423 | 10946 | 11469 | 11992 |
| 333 | 8332 | 8855 | 9378 | 9901 | 10424 | 10947 | 11470 | 11993 |
| 334 | 8333 | 8856 | 9379 | 9902 | 10425 | 10948 | 11471 | 11994 |
| 335 | 8334 | 8857 | 9380 | 9903 | 10426 | 10949 | 11472 | 11995 |
| 336 | 8335 | 8858 | 9381 | 9904 | 10427 | 10950 | 11473 | 11996 |
| 337 | 8336 | 8859 | 9382 | 9905 | 10428 | 10951 | 11474 | 11997 |
| 338 | 8337 | 8860 | 9383 | 9906 | 10429 | 10952 | 11475 | 11998 |
| 339 | 8338 | 8861 | 9384 | 9907 | 10430 | 10953 | 11476 | 11999 |
| 340 | 8339 | 8862 | 9385 | 9908 | 10431 | 10954 | 11477 | 12000 |
| 341 | 8340 | 8863 | 9386 | 9909 | 10432 | 10955 | 11478 | 12001 |
| 342 | 8341 | 8864 | 9387 | 9910 | 10433 | 10956 | 11479 | 12002 |
| 343 | 8342 | 8865 | 9388 | 9911 | 10434 | 10957 | 11480 | 12003 |
| 344 | 8343 | 8866 | 9389 | 9912 | 10435 | 10958 | 11481 | 12004 |
| 345 | 8344 | 8867 | 9390 | 9913 | 10436 | 10959 | 11482 | 12005 |
| 346 | 8345 | 8868 | 9391 | 9914 | 10437 | 10960 | 11483 | 12006 |
| 347 | 8346 | 8869 | 9392 | 9915 | 10438 | 10961 | 11484 | 12007 |
| 348 | 8347 | 8870 | 9393 | 9916 | 10439 | 10962 | 11485 | 12008 |
| 349 | 8348 | 8871 | 9394 | 9917 | 10440 | 10963 | 11486 | 12009 |
| 350 | 8349 | 8872 | 9395 | 9918 | 10441 | 10964 | 11487 | 12010 |
| 351 | 8350 | 8873 | 9396 | 9919 | 10442 | 10965 | 11488 | 12011 |
| 352 | 8351 | 8874 | 9397 | 9920 | 10443 | 10966 | 11489 | 12012 |
| 353 | 8352 | 8875 | 9398 | 9921 | 10444 | 10967 | 11490 | 12013 |
| 354 | 8353 | 8876 | 9399 | 9922 | 10445 | 10968 | 11491 | 12014 |
| 355 | 8354 | 8877 | 9400 | 9923 | 10446 | 10969 | 11492 | 12015 |
| 356 | 8355 | 8878 | 9401 | 9924 | 10447 | 10970 | 11493 | 12016 |
| 357 | 8356 | 8879 | 9402 | 9925 | 10448 | 10971 | 11494 | 12017 |
| 358 | 8357 | 8880 | 9403 | 9926 | 10449 | 10972 | 11495 | 12018 |
| 359 | 8358 | 8881 | 9404 | 9927 | 10450 | 10973 | 11496 | 12019 |
| 360 | 8359 | 8882 | 9405 | 9928 | 10451 | 10974 | 11497 | 12020 |
| 361 | 8360 | 8883 | 9406 | 9929 | 10452 | 10975 | 11498 | 12021 |
| 362 | 8361 | 8884 | 9407 | 9930 | 10453 | 10976 | 11499 | 12022 |
| 363 | 8362 | 8885 | 9408 | 9931 | 10454 | 10977 | 11500 | 12023 |
| 364 | 8363 | 8886 | 9409 | 9932 | 10455 | 10978 | 11501 | 12024 |
| 365 | 8364 | 8887 | 9410 | 9933 | 10456 | 10979 | 11502 | 12025 |
| 366 | 8365 | 8888 | 9411 | 9934 | 10457 | 10980 | 11503 | 12026 |
| 367 | 8366 | 8889 | 9412 | 9935 | 10458 | 10981 | 11504 | 12027 |
| 368 | 8367 | 8890 | 9413 | 9936 | 10459 | 10982 | 11505 | 12028 |
| 369 | 8368 | 8891 | 9414 | 9937 | 10460 | 10983 | 11506 | 12029 |
| 370 | 8369 | 8892 | 9415 | 9938 | 10461 | 10984 | 11507 | 12030 |
| 371 | 8370 | 8893 | 9416 | 9939 | 10462 | 10985 | 11508 | 12031 |
| 372 | 8371 | 8894 | 9417 | 9940 | 10463 | 10986 | 11509 | 12032 |
| 373 | 8372 | 8895 | 9418 | 9941 | 10464 | 10987 | 11510 | 12033 |
| 374 | 8373 | 8896 | 9419 | 9942 | 10465 | 10988 | 11511 | 12034 |
| 375 | 8374 | 8897 | 9420 | 9943 | 10466 | 10989 | 11512 | 12035 |
| 376 | 8375 | 8898 | 9421 | 9944 | 10467 | 10990 | 11513 | 12036 |
| 377 | 8376 | 8899 | 9422 | 9945 | 10468 | 10991 | 11514 | 12037 |
| 378 | 8377 | 8900 | 9423 | 9946 | 10469 | 10992 | 11515 | 12038 |
| 379 | 8378 | 8901 | 9424 | 9947 | 10470 | 10993 | 11516 | 12039 |
| 380 | 8379 | 8902 | 9425 | 9948 | 10471 | 10994 | 11517 | 12040 |
| 381 | 8380 | 8903 | 9426 | 9949 | 10472 | 10995 | 11518 | 12041 |
| 382 | 8381 | 8904 | 9427 | 9950 | 10473 | 10996 | 11519 | 12042 |
| 383 | 8382 | 8905 | 9428 | 9951 | 10474 | 10997 | 11520 | 12043 |
| 384 | 8383 | 8906 | 9429 | 9952 | 10475 | 10998 | 11521 | 12044 |
| 385 | 8384 | 8907 | 9430 | 9953 | 10476 | 10999 | 11522 | 12045 |
| 386 | 8385 | 8908 | 9431 | 9954 | 10477 | 11000 | 11523 | 12046 |
| 387 | 8386 | 8909 | 9432 | 9955 | 10478 | 11001 | 11524 | 12047 |
| 388 | 8387 | 8910 | 9433 | 9956 | 10479 | 11002 | 11525 | 12048 |
| 389 | 8388 | 8911 | 9434 | 9957 | 10480 | 11003 | 11526 | 12049 |
| 390 | 8389 | 8912 | 9435 | 9958 | 10481 | 11004 | 11527 | 12050 |
| 391 | 8390 | 8913 | 9436 | 9959 | 10482 | 11005 | 11528 | 12051 |
| 392 | 8391 | 8914 | 9437 | 9960 | 10483 | 11006 | 11529 | 12052 |
| 393 | 8392 | 8915 | 9438 | 9961 | 10484 | 11007 | 11530 | 12053 |
| 394 | 8393 | 8916 | 9439 | 9962 | 10485 | 11008 | 11531 | 12054 |
| 395 | 8394 | 8917 | 9440 | 9963 | 10486 | 11009 | 11532 | 12055 |
| 396 | 8395 | 8918 | 9441 | 9964 | 10487 | 11010 | 11533 | 12056 |
| 397 | 8396 | 8919 | 9442 | 9965 | 10488 | 11011 | 11534 | 12057 |
| 398 | 8397 | 8920 | 9443 | 9966 | 10489 | 11012 | 11535 | 12058 |
| 399 | 8398 | 8921 | 9444 | 9967 | 10490 | 11013 | 11536 | 12059 |
| 400 | 8399 | 8922 | 9445 | 9968 | 10491 | 11014 | 11537 | 12060 |
| 401 | 8400 | 8923 | 9446 | 9969 | 10492 | 11015 | 11538 | 12061 |
| 402 | 8401 | 8924 | 9447 | 9970 | 10493 | 11016 | 11539 | 12062 |
| 403 | 8402 | 8925 | 9448 | 9971 | 10494 | 11017 | 11540 | 12063 |
| 404 | 8403 | 8926 | 9449 | 9972 | 10495 | 11018 | 11541 | 12064 |
| 405 | 8404 | 8927 | 9450 | 9973 | 10496 | 11019 | 11542 | 12065 |
| 406 | 8405 | 8928 | 9451 | 9974 | 10497 | 11020 | 11543 | 12066 |
| 407 | 8406 | 8929 | 9452 | 9975 | 10498 | 11021 | 11544 | 12067 |
| 408 | 8407 | 8930 | 9453 | 9976 | 10499 | 11022 | 11545 | 12068 |
| 409 | 8408 | 8931 | 9454 | 9977 | 10500 | 11023 | 11546 | 12069 |
| 410 | 8409 | 8932 | 9455 | 9978 | 10501 | 11024 | 11547 | 12070 |
| 411 | 8410 | 8933 | 9456 | 9979 | 10502 | 11025 | 11548 | 12071 |
| 412 | 8411 | 8934 | 9457 | 9980 | 10503 | 11026 | 11549 | 12072 |
| 413 | 8412 | 8935 | 9458 | 9981 | 10504 | 11027 | 11550 | 12073 |
| 414 | 8413 | 8936 | 9459 | 9982 | 10505 | 11028 | 11551 | 12074 |
| 415 | 8414 | 8937 | 9460 | 9983 | 10506 | 11029 | 11552 | 12075 |
| 416 | 8415 | 8938 | 9461 | 9984 | 10507 | 11030 | 11553 | 12076 |
| 417 | 8416 | 8939 | 9462 | 9985 | 10508 | 11031 | 11554 | 12077 |
| 418 | 8417 | 8940 | 9463 | 9986 | 10509 | 11032 | 11555 | 12078 |
| 419 | 8418 | 8941 | 9464 | 9987 | 10510 | 11033 | 11556 | 12079 |
| 420 | 8419 | 8942 | 9465 | 9988 | 10511 | 11034 | 11557 | 12080 |
| 421 | 8420 | 8943 | 9466 | 9989 | 10512 | 11035 | 11558 | 12081 |
| 422 | 8421 | 8944 | 9467 | 9990 | 10513 | 11036 | 11559 | 12082 |
| 423 | 8422 | 8945 | 9468 | 9991 | 10514 | 11037 | 11560 | 12083 |
| 424 | 8423 | 8946 | 9469 | 9992 | 10515 | 11038 | 11561 | 12084 |
| 425 | 8424 | 8947 | 9470 | 9993 | 10516 | 11039 | 11562 | 12085 |
| 426 | 8425 | 8948 | 9471 | 9994 | 10517 | 11040 | 11563 | 12086 |
| 427 | 8426 | 8949 | 9472 | 9995 | 10518 | 11041 | 11564 | 12087 |
| 428 | 8427 | 8950 | 9473 | 9996 | 10519 | 11042 | 11565 | 12088 |
| 429 | 8428 | 8951 | 9474 | 9997 | 10520 | 11043 | 11566 | 12089 |
| 430 | 8429 | 8952 | 9475 | 9998 | 10521 | 11044 | 11567 | 12090 |
| 431 | 8430 | 8953 | 9476 | 9999 | 10522 | 11045 | 11568 | 12091 |
| 432 | 8431 | 8954 | 9477 | 10000 | 10523 | 11046 | 11569 | 12092 |
| 433 | 8432 | 8955 | 9478 | 10001 | 10524 | 11047 | 11570 | 12093 |
| 434 | 8433 | 8956 | 9479 | 10002 | 10525 | 11048 | 11571 | 12094 |
| 435 | 8434 | 8957 | 9480 | 10003 | 10526 | 11049 | 11572 | 12095 |
| 436 | 8435 | 8958 | 9481 | 10004 | 10527 | 11050 | 11573 | 12096 |
| 437 | 8436 | 8959 | 9482 | 10005 | 10528 | 11051 | 11574 | 12097 |
| 438 | 8437 | 8960 | 9483 | 10006 | 10529 | 11052 | 11575 | 12098 |
| 439 | 8438 | 8961 | 9484 | 10007 | 10530 | 11053 | 11576 | 12099 |
| 440 | 8439 | 8962 | 9485 | 10008 | 10531 | 11054 | 11577 | 12100 |
| 441 | 8440 | 8963 | 9486 | 10009 | 10532 | 11055 | 11578 | 12101 |
| 442 | 8441 | 8964 | 9487 | 10010 | 10533 | 11056 | 11579 | 12102 |
| 443 | 8442 | 8965 | 9488 | 10011 | 10534 | 11057 | 11580 | 12103 |
| 444 | 8443 | 8966 | 9489 | 10012 | 10535 | 11058 | 11581 | 12104 |
| 445 | 8444 | 8967 | 9490 | 10013 | 10536 | 11059 | 11582 | 12105 |
| 446 | 8445 | 8968 | 9491 | 10014 | 10537 | 11060 | 11583 | 12106 |
| 447 | 8446 | 8969 | 9492 | 10015 | 10538 | 11061 | 11584 | 12107 |
| 448 | 8447 | 8970 | 9493 | 10016 | 10539 | 11062 | 11585 | 12108 |
| 449 | 8448 | 8971 | 9494 | 10017 | 10540 | 11063 | 11586 | 12109 |
| 450 | 8449 | 8972 | 9495 | 10018 | 10541 | 11064 | 11587 | 12110 |
| 451 | 8450 | 8973 | 9496 | 10019 | 10542 | 11065 | 11588 | 12111 |
| 452 | 8451 | 8974 | 9497 | 10020 | 10543 | 11066 | 11589 | 12112 |
| 453 | 8452 | 8975 | 9498 | 10021 | 10544 | 11067 | 11590 | 12113 |
| 454 | 8453 | 8976 | 9499 | 10022 | 10545 | 11068 | 11591 | 12114 |
| 455 | 8454 | 8977 | 9500 | 10023 | 10546 | 11069 | 11592 | 12115 |
| 456 | 8455 | 8978 | 9501 | 10024 | 10547 | 11070 | 11593 | 12116 |
| 457 | 8456 | 8979 | 9502 | 10025 | 10548 | 11071 | 11594 | 12117 |
| 458 | 8457 | 8980 | 9503 | 10026 | 10549 | 11072 | 11595 | 12118 |
| 459 | 8458 | 8981 | 9504 | 10027 | 10550 | 11073 | 11596 | 12119 |
| 460 | 8459 | 8982 | 9505 | 10028 | 10551 | 11074 | 11597 | 12120 |
| 461 | 8460 | 8983 | 9506 | 10029 | 10552 | 11075 | 11598 | 12121 |
| 462 | 8461 | 8984 | 9507 | 10030 | 10553 | 11076 | 11599 | 12122 |
| 463 | 8462 | 8985 | 9508 | 10031 | 10554 | 11077 | 11600 | 12123 |
| 464 | 8463 | 8986 | 9509 | 10032 | 10555 | 11078 | 11601 | 12124 |
| 465 | 8464 | 8987 | 9510 | 10033 | 10556 | 11079 | 11602 | 12125 |
| 466 | 8465 | 8988 | 9511 | 10034 | 10557 | 11080 | 11603 | 12126 |
| 467 | 8466 | 8989 | 9512 | 10035 | 10558 | 11081 | 11604 | 12127 |
| 468 | 8467 | 8990 | 9513 | 10036 | 10559 | 11082 | 11605 | 12128 |
| 469 | 8468 | 8991 | 9514 | 10037 | 10560 | 11083 | 11606 | 12129 |
| 470 | 8469 | 8992 | 9515 | 10038 | 10561 | 11084 | 11607 | 12130 |
| 471 | 8470 | 8993 | 9516 | 10039 | 10562 | 11085 | 11608 | 12131 |
| 472 | 8471 | 8994 | 9517 | 10040 | 10563 | 11086 | 11609 | 12132 |
| 473 | 8472 | 8995 | 9518 | 10041 | 10564 | 11087 | 11610 | 12133 |
| 474 | 8473 | 8996 | 9519 | 10042 | 10565 | 11088 | 11611 | 12134 |
| 475 | 8474 | 8997 | 9520 | 10043 | 10566 | 11089 | 11612 | 12135 |
| 476 | 8475 | 8998 | 9521 | 10044 | 10567 | 11090 | 11613 | 12136 |
| 477 | 8476 | 8999 | 9522 | 10045 | 10568 | 11091 | 11614 | 12137 |
| 478 | 8477 | 9000 | 9523 | 10046 | 10569 | 11092 | 11615 | 12138 |
| 479 | 8478 | 9001 | 9524 | 10047 | 10570 | 11093 | 11616 | 12139 |
| 480 | 8479 | 9002 | 9525 | 10048 | 10571 | 11094 | 11617 | 12140 |
| 481 | 8480 | 9003 | 9526 | 10049 | 10572 | 11095 | 11618 | 12141 |
| 482 | 8481 | 9004 | 9527 | 10050 | 10573 | 11096 | 11619 | 12142 |
| 483 | 8482 | 9005 | 9528 | 10051 | 10574 | 11097 | 11620 | 12143 |
| 484 | 8483 | 9006 | 9529 | 10052 | 10575 | 11098 | 11621 | 12144 |
| 485 | 8484 | 9007 | 9530 | 10053 | 10576 | 11099 | 11622 | 12145 |
| 486 | 8485 | 9008 | 9531 | 10054 | 10577 | 11100 | 11623 | 12146 |
| 487 | 8486 | 9009 | 9532 | 10055 | 10578 | 11101 | 11624 | 12147 |
| 488 | 8487 | 9010 | 9533 | 10056 | 10579 | 11102 | 11625 | 12148 |
| 489 | 8488 | 9011 | 9534 | 10057 | 10580 | 11103 | 11626 | 12149 |
| 490 | 8489 | 9012 | 9535 | 10058 | 10581 | 11104 | 11627 | 12150 |
| 491 | 8490 | 9013 | 9536 | 10059 | 10582 | 11105 | 11628 | 12151 |
| 492 | 8491 | 9014 | 9537 | 10060 | 10583 | 11106 | 11629 | 12152 |
| 493 | 8492 | 9015 | 9538 | 10061 | 10584 | 11107 | 11630 | 12153 |
| 494 | 8493 | 9016 | 9539 | 10062 | 10585 | 11108 | 11631 | 12154 |
| 495 | 8494 | 9017 | 9540 | 10063 | 10586 | 11109 | 11632 | 12155 |
| 496 | 8495 | 9018 | 9541 | 10064 | 10587 | 11110 | 11633 | 12156 |
| 497 | 8496 | 9019 | 9542 | 10065 | 10588 | 11111 | 11634 | 12157 |
| 498 | 8497 | 9020 | 9543 | 10066 | 10589 | 11112 | 11635 | 12158 |
| 499 | 8498 | 9021 | 9544 | 10067 | 10590 | 11113 | 11636 | 12159 |
| 500 | 8499 | 9022 | 9545 | 10068 | 10591 | 11114 | 11637 | 12160 |
| 501 | 8500 | 9023 | 9546 | 10069 | 10592 | 11115 | 11638 | 12161 |
| 502 | 8501 | 9024 | 9547 | 10070 | 10593 | 11116 | 11639 | 12162 |
| 503 | 8502 | 9025 | 9548 | 10071 | 10594 | 11117 | 11640 | 12163 |
| 504 | 8503 | 9026 | 9549 | 10072 | 10595 | 11118 | 11641 | 12164 |
| 505 | 8504 | 9027 | 9550 | 10073 | 10596 | 11119 | 11642 | 12165 |
| 506 | 8505 | 9028 | 9551 | 10074 | 10597 | 11120 | 11643 | 12166 |
| 507 | 8506 | 9029 | 9552 | 10075 | 10598 | 11121 | 11644 | 12167 |
| 508 | 8507 | 9030 | 9553 | 10076 | 10599 | 11122 | 11645 | 12168 |
| 509 | 8508 | 9031 | 9554 | 10077 | 10600 | 11123 | 11646 | 12169 |
| 510 | 8509 | 9032 | 9555 | 10078 | 10601 | 11124 | 11647 | 12170 |
| 511 | 8510 | 9033 | 9556 | 10079 | 10602 | 11125 | 11648 | 12171 |
| 512 | 8511 | 9034 | 9557 | 10080 | 10603 | 11126 | 11649 | 12172 |
| 513 | 8512 | 9035 | 9558 | 10081 | 10604 | 11127 | 11650 | 12173 |
| 514 | 8513 | 9036 | 9559 | 10082 | 10605 | 11128 | 11651 | 12174 |
| 515 | 8514 | 9037 | 9560 | 10083 | 10606 | 11129 | 11652 | 12175 |
| 516 | 8515 | 9038 | 9561 | 10084 | 10607 | 11130 | 11653 | 12176 |
| 517 | 8516 | 9039 | 9562 | 10085 | 10608 | 11131 | 11654 | 12177 |
| 518 | 8517 | 9040 | 9563 | 10086 | 10609 | 11132 | 11655 | 12178 |
| 519 | 8518 | 9041 | 9564 | 10087 | 10610 | 11133 | 11656 | 12179 |
| 520 | 8519 | 9042 | 9565 | 10088 | 10611 | 11134 | 11657 | 12180 |
| 521 | 8520 | 9043 | 9566 | 10089 | 10612 | 11135 | 11658 | 12181 |
| 522 | 8521 | 9044 | 9567 | 10090 | 10613 | 11136 | 11659 | 12182 |
| 523 | 8522 | 9045 | 9568 | 10091 | 10614 | 11137 | 11660 | 12183 |

What is claimed is:

1. An isolated antigen binding protein (ABP) that specifically binds a human programmed cell death protein 1 (PD-1), comprising:
(a) a CDR3-L having a sequence selected from SEQ ID NOS: 3001-3028 and a CDR3-H having a sequence selected from SEQ ID NOS: 6001-6028; or
(b) a CDR3-L having a sequence selected from SEQ ID NOS: 10092-10614 and a CDR3-H having a sequence selected from SEQ ID NOS: 11661-12183; or
(c) a CDR3-L having a sequence of the CD3-L of any one of the clones in the library deposited under ATCC Accession No. PTA-125509 and a CDR3-L having a sequence of the CD3-L of any one of the clones in the library deposited under ATCC Accession No. PTA-125509.

2. The ABP of claim 1, wherein the CDR3-L and the CDR3-H are a cognate pair.

3. The ABP of claim 1, comprising
(a) a CDR1-L having a sequence selected from SEQ ID NOS: 1001-1028 and a CDR2-L having a sequence selected from SEQ ID NOS: 2001-2028; and a CDR1-H having a sequence selected from SEQ ID NOS: 4001-4028; and a CDR2-H having a sequence selected from SEQ ID NOS: 5001-5028; or
(b) a CDR1-L having a sequence selected from SEQ ID NOS: 9046-9568; and a CDR2-L having a sequence selected from SEQ ID NOS: 9569-10091 and a CDR1-H having a sequence selected from SEQ ID NOS: 10615-11137; and a CDR2-H having a sequence selected from SEQ ID NOS: 11138-11660; or
(c) a CDR1-L having a sequence selected from a CDR1-L of any one of the clones in the library deposited under ATCC Accession No. PTA-125509; and a CDR2-L having a sequence selected from a CDR2-L of any one of the clones in the library deposited under ATCC Accession No. PTA-125509; and a CDR1-H having a sequence selected from a CDR1-H of any one of the clones in the library deposited under ATCC Accession No. PTA-125509; and a CDR2-H having a sequence selected from a CDR2-H of any one of the clones in the library deposited under ATCC Accession No. PTA-125509.

4. The ABP of claim 1, comprising a CDR1-L, a CDR2-L, a CDR3-L, a CDR1-H, a CDR2-H and a CDR3-H, wherein
the CDR1-L consists of SEQ ID NO: 1001, the CDR2-L consists of SEQ ID NO: 2001, the CDR3-L consists of SEQ ID NO: 3001, the CDR1-H consists of SEQ ID NO: 4001, the CDR2-H consists of SEQ ID NO: 5001 and the CDR3-H consists of SEQ ID NO: 6001; or
the CDR1-L consists of SEQ ID NO: 1002, CDR2-L consists of SEQ ID NO: 2002, the CDR3-L consists of SEQ ID NO: 3002, the CDR1-H consists of SEQ ID NO: 4002, the CDR2-H consists of SEQ ID NO: 5002 and the CDR3-H consists of SEQ ID NO: 6002; or
the CDR1-L consists of SEQ ID NO: 1003, the CDR2-L consists of SEQ ID NO: 2003, the CDR3-L consists of SEQ ID NO: 3003, the CDR1-H consists of SEQ ID NO: 4003, the CDR2-H consists of SEQ ID NO: 5003 and the CDR3-H consists of SEQ ID NO: 6003; or
the CDR1-L consists of SEQ ID NO: 1004, the CDR2-L consists of SEQ ID NO: 2004, the CDR3-L consists of SEQ ID NO: 3004, the CDR1-H consists of SEQ ID NO: 4004, the CDR2-H consists of SEQ ID NO: 5004 and the CDR3-H consists of SEQ ID NO: 6004; or
the CDR1-L consists of SEQ ID NO: 1005, the CDR2-L consists of SEQ ID NO: 2005, the CDR3-L consists of SEQ ID NO: 3005, the CDR1-H consists of SEQ ID NO: 4005, the CDR2-H consists of SEQ ID NO: 5005 and the CDR3-H consists of SEQ ID NO: 6005; or
the CDR1-L consists of SEQ ID NO: 1006, the CDR2-L consists of SEQ ID NO: 2006, the CDR3-L consists of SEQ ID NO: 3006, the CDR1-H consists of SEQ ID NO: 4006, the CDR2-H consists of SEQ ID NO: 5006 and the CDR3-H consists of SEQ ID NO: 6006; or
the CDR1-L consists of SEQ ID NO: 1007, the CDR2-L consists of SEQ ID NO: 2007, the CDR3-L consists of SEQ ID NO: 3007, the CDR1-H consists of SEQ ID NO: 4007, the CDR2-H consists of SEQ ID NO: 5007 and the CDR3-H consists of SEQ ID NO: 6007; or
the CDR1-L consists of SEQ ID NO: 1008, the CDR2-L consists of SEQ ID NO: 2008, the CDR3-L consists of SEQ ID NO: 3008, the CDR1-H consists of SEQ ID NO: 4008, the CDR2-H consists of SEQ ID NO: 5008 and the CDR3-H consists of SEQ ID NO: 6008 or
the CDR1-L consists of SEQ ID NO: 1009, the CDR2-L consists of SEQ ID NO: 2009, the CDR3-L consists of SEQ ID NO: 3009, the CDR1-H consists of SEQ ID NO: 4009, the CDR2-H consists of SEQ ID NO: 5009 and the CDR3-H consists of SEQ ID NO: 6009; or
the CDR1-L consists of SEQ ID NO: 1010, the CDR2-L consists of SEQ ID NO: 2010, the CDR3-L consists of SEQ ID NO: 3010, the CDR1-H consists of SEQ ID NO: 4010, the CDR2-H consists of SEQ ID NO: 5010 and the CDR3-H consists of SEQ ID NO: 6010; or
the CDR1-L consists of SEQ ID NO: 1011, the CDR2-L consists of SEQ ID NO: 2011, the CDR3-L consists of SEQ ID NO: 3011, the CDR1-H consists of SEQ ID NO: 4011, the CDR2-H consists of SEQ ID NO: 5011 and the CDR3-H consists of SEQ ID NO: 6011; or
the CDR1-L consists of SEQ ID NO: 1012, the CDR2-L consists of SEQ ID NO: 2012, the CDR3-L consists of SEQ ID NO: 3012, the CDR1-H consists of SEQ ID NO: 4012, the CDR2-H consists of SEQ ID NO: 5012 and the CDR3-H consists of SEQ ID NO: 6012; or
the CDR1-L consists of SEQ ID NO: 1013, the CDR2-L consists of SEQ ID NO: 2013, the CDR3-L consists of SEQ ID NO: 3013, the CDR1-H consists of SEQ ID NO: 4013, the CDR2-H consists of SEQ ID NO: 5013 and the CDR3-H consists of SEQ ID NO: 6013; or
the CDR1-L consists of SEQ ID NO: 1014, the CDR2-L consists of SEQ ID NO: 2014, the CDR3-L consists of SEQ ID NO: 3014, the CDR1-H consists of SEQ ID NO: 4014, the CDR2-H consists of SEQ ID NO: 5014 and the CDR3-H consists of SEQ ID NO: 6014; or
the CDR1-L consists of SEQ ID NO: 1015, the CDR2-L consists of SEQ ID NO: 2015, the CDR3-L consists of SEQ ID NO: 3015, the CDR1-H consists of SEQ ID NO: 4015, the CDR2-H consists of SEQ ID NO: 5015 and the CDR3-H consists of SEQ ID NO: 6015; or
the CDR1-L consists of SEQ ID NO: 1016, the CDR2-L consists of SEQ ID NO: 2016, the CDR3-L consists of SEQ ID NO: 3016, the CDR1-H consists of SEQ ID NO: 4016, the CDR2-H consists of SEQ ID NO: 5016 and the CDR3-H consists of SEQ ID NO: 6016; or
the CDR1-L consists of SEQ ID NO: 1017, the CDR2-L consists of SEQ ID NO: 2017, the CDR3-L consists of SEQ ID NO: 3017, the CDR1-H consists of SEQ ID NO: 4017, the CDR2-H consists of SEQ ID NO: 5017 and the CDR3-H consists of SEQ ID NO: 6017; or
the CDR1-L consists of SEQ ID NO: 1018, the CDR2-L consists of SEQ ID NO: 2018, the CDR3-L consists of SEQ ID NO: 3018, the CDR1-H consists of SEQ ID NO: 4018, the CDR2-H consists of SEQ ID NO: 5018 and the CDR3-H consists of SEQ ID NO: 6018; or
the CDR1-L consists of SEQ ID NO: 1019, the CDR2-L consists of SEQ ID NO: 2019, the CDR3-L consists of SEQ ID NO: 3019, the CDR1-H consists of SEQ ID NO: 4019, the CDR2-H consists of SEQ ID NO: 5019 and the CDR3-H consists of SEQ ID NO: 6019; or
the CDR1-L consists of SEQ ID NO: 1020, the CDR2-L consists of SEQ ID NO: 2020, the CDR3-L consists of SEQ ID NO: 3020, the CDR1-H consists of SEQ ID NO: 4020, the CDR2-H consists of SEQ ID NO: 5020 and the CDR3-H consists of SEQ ID NO: 6020; or
the CDR1-L consists of SEQ ID NO: 1021, the CDR2-L consists of SEQ ID NO: 2021, the CDR3-L consists of SEQ ID NO: 3021, the CDR1-H consists of SEQ ID NO: 4021, the CDR2-H consists of SEQ ID NO: 5021 and the CDR3-H consists of SEQ ID NO: 6021; or
the CDR1-L consists of SEQ ID NO: 1022, the CDR2-L consists of SEQ ID NO: 2022, the CDR3-L consists of SEQ ID NO: 3022, the CDR1-H consists of SEQ ID NO: 4022, the CDR2-H consists of SEQ ID NO: 5022 and the CDR3-H consists of SEQ ID NO: 6022; or
the CDR1-L consists of SEQ ID NO: 1023, the CDR2-L consists of SEQ ID NO: 2023, the CDR3-L consists of SEQ ID NO: 3023, the CDR1-H consists of SEQ ID NO: 4023, the CDR2-H consists of SEQ ID NO: 5023 and the CDR3-H consists of SEQ ID NO: 6023; or
the CDR1-L consists of SEQ ID NO: 1024, the CDR2-L consists of SEQ ID NO: 2024, the CDR3-L consists of SEQ ID NO: 3024, the CDR1-H consists of SEQ ID NO: 4024, the CDR2-H consists of SEQ ID NO: 5024 and the CDR3-H consists of SEQ ID NO: 6024; or
the CDR1-L consists of SEQ ID NO: 1025, the CDR2-L consists of SEQ ID NO: 2025, the CDR3-L consists of SEQ ID NO: 3025, the CDR1-H consists of SEQ ID NO: 4025, the CDR2-H consists of SEQ ID NO: 5025 and the CDR3-H consists of SEQ ID NO: 6025; or
the CDR1-L consists of SEQ ID NO: 1026, the CDR2-L consists of SEQ ID NO: 2026, the CDR3-L consists of SEQ ID NO: 3026, the CDR1-H consists of SEQ ID NO: 4026, the CDR2-H consists of SEQ ID NO: 5026 and the CDR3-H consists of SEQ ID NO: 6026; or
the CDR1-L consists of SEQ ID NO: 1027, the CDR2-L consists of SEQ ID NO: 2027, the CDR3-L consists of SEQ ID NO: 3027, the CDR1-H consists of SEQ ID NO: 4027, the CDR2-H consists of SEQ ID NO: 5027 and the CDR3-H consists of SEQ ID NO: 6027; or
the CDR1-L consists of SEQ ID NO: 1028, the CDR2-L consists of SEQ ID NO: 2028, the CDR3-L consists of SEQ ID NO: 3028, the CDR1-H consists of SEQ ID NO: 4028, the CDR2-H consists of SEQ ID NO: 5028 and the CDR3-H consists of SEQ ID NO: 6028.

5. The ABP of claim 1, comprising
a variable light chain (V_{L}) comprising a sequence at least 97% identical to a sequence selected from SEQ ID NOS: 1-28 and a variable heavy chain (V_{H}) comprising a sequence at least 97% identical to a sequence selected from SEQ ID NOS: 101-128; or
a variable light chain (V_{L}) comprising a sequence at least 97% identical to a sequence selected from SEQ ID NOS: 8000-8522 and a variable heavy chain (V_{H}) comprising a sequence at least 97% identical to a sequence selected from SEQ ID NOS: 8523-9045; or
a variable light chain (V_{L}) comprising a sequence at least 97% identical to a V_{L} sequence of any one of the clones in the library deposited under ATCC Accession No. PTA-125509 and a variable heavy chain (V_{H}) comprising a sequence at least 97% identical to a V_{H} sequence of any one of the clones in the library deposited under ATCC Accession No. PTA-125509.

6. The ABP of claim 5, wherein the V_{L} and the V_{H} are a cognate pair.

7. The ABP of claim 1, comprising
a variable light chain (V_{L}) comprising a sequence selected from SEQ ID NOS: 1-28 and a variable heavy chain (V_{H}) comprising a a sequence selected from SEQ ID NOS: 101-128 or
a variable light chain (V_{L}) comprising a sequence selected from SEQ ID NOS: 8000-8522 and a variable heavy chain (V_{H}) comprising a sequence selected from SEQ ID NOS: 8523-9045; or
a variable light chain (V_{L}) comprising a V_{L} sequence of any one of the clones in the library deposited under ATCC Accession No. PTA-125509 and a variable heavy chain (V_{H}) comprising a V_{H} sequence of any one of the clones in the library deposited under ATCC Accession No. PTA-125509.

8. The ABP of claim 7, wherein the V_{L} and the V_{H} are a cognate pair.

9. The ABP of any of claims 1-8, wherein the ABP comprises an scFv or a full length monoclonal antibody.

10. The ABP of any of claims 1-8, wherein the ABP comprises an immunoglobulin constant region.

11. The ABP of any of the above claims, wherein the ABP binds human PD-1 with a K_{D} of less than 500nM, as measured by bio-layer interferometry or surface plasmon resonance.

12. The ABP of claim 11, wherein the ABP binds human PD-1 with a K_{D} of less than 200 nM, as measured by bio-layer interferometry or surface plasmon resonance.

13. The ABP of claim 12, wherein the ABP binds human PD-1 with a K_{D} of less than 25 nM, as measured by bio-layer interferometry or surface plasmon resonance.

14. The ABP of any of claims 1-13, wherein the ABP binds to human PD-1 on a cell surface with a K_{D} of less than 25 nM.

15. A pharmaceutical composition comprising the ABP of any of claims 1-14 and an excipient.

16. A method of treating a disease comprising the step of:
administering to a subject in need thereof an effective amount of the ABP of any of claims 1-14 or the pharmaceutical composition of claim 15.

17. The method of claim 16, wherein the disease is selected from the group consisting of cancer, AIDS, Alzheimer's disease and viral or bacterial infection.

18. The method of any of claims 16-17, further comprising the step of administering one or more additional therapeutic agents to the subject.

19. The method of claim 18, wherein the additional therapeutic agent is selected from CTLA-4 inhibitor, TIGIT inhibitor, a chemotherapy agent, an immune-stimulatory agent, radiation, a cytokine, a polynucleotide encoding a cytokine and a combination thereof.

20. An isolated polynucleotide encoding the ABP of any of claims 1-10.

21. A vector comprising the isolated polynucleotide of claim 20.

22. A host cell comprising the isolated polynucleotide of claim 20 or the vector of claim 21.

23. A method of producing an isolated antigen binding protein (ABP) that specifically binds human PD-1, comprising:
expressing the ABP in the host cell of claim 22, and isolating the ABP.

The application's sequence listing, which the Patent Office published only in electronic form, follows.

SEQUENCE LISTING (12221 sequences)

SEQ ID NO: 1 - protein, 108 aa, Homo sapiens
DIQMTQSPSSLSASVGDRVTITCRASQGIRNDLGWYQQKPGKAPKRLIYVASSLQSGVPSRFSGSGSGTEFTLTISSLQPEDFATYYCLQHNSYPLTFGGGTKVEIKR

SEQ ID NO: 2 - protein, 108 aa, Homo sapiens
DIQMTQSPSSLSASVGDRVTITCRASQAIRNDLGWFQQKPGKAPKRLIYAASSLQSGVPLRFSGSGSGTEFTLTISSLQPEDFATYYCLQHNSFPWTFGQGTKVEIKR

SEQ ID NO: 3 - protein, 108 aa, Homo sapiens
DIQMTQSPSSLSASVGDRVTITCRASQGIRNELGWYQQKPGKAPKRLIYAASSLQSGVPSRFSGSGSGTEFTLTISSLQPEDFATYYCLQHYIYPWTFGQGTKVEIKR

SEQ ID NO: 4 - protein, 108 aa, Homo sapiens
DIQMTQSPSSLSASVGDRVTITCRASQGISSWLAWYQQKPEKAPKSLIYAASSLQSGVPSRFSGSGSGTDFTLTISSLQPEDFATYYCQQYNSYPYTFGQGTKLEIKR

SEQ ID NO: 5 - protein, 108 aa, Homo sapiens
AIQLTQSPSSLSASVGDRVTITCRASQGISSALAWYQQKPGKAPKLLIYDASSLESGVPSRFSGSGSGTDFTLTISSLQPEDFATYYCQQFNNYPWTFGQGTKVEIKR

SEQ ID NO: 6 - protein, 108 aa, Homo sapiens
DIQMTQSPSSLSASVGDRVTITCRASQGIRNDLGWYQQKPGKAPKRLLYAASNLQLGVPSRFSGSGSETEFTLTISSLQPEDFATYYCLQHNSYPWTFGQGTKVEIKR

SEQ ID NO: 7 - protein, 108 aa, Homo sapiens
EIVMTQSPATLSVSPGERATLSCRASQSVSSNLAWYQQKPGQAPRLLIYGSSTRATGIPARFSGSGSGTEFTLTISSLQSEDFAVYYCQQYNNWPYTFGQGTKLEIKR

SEQ ID NO: 8 - protein, 108 aa, Homo sapiens
EIVLTQSPATLSLSPGERATLSCRASQSVSSYLAWYQQKPGQAPRLLIYDASNRATGIPARFSGSGSGTDFTLTISSLEPEDFAVYYCQQRNTWPYTFGQGTKLEIKR

SEQ ID NO: 9 - protein, 107 aa, Homo sapiens
AIQMTQSPSSLSASVGDRVTITCRASQDIRNDLGWYQQKPGKAPKLLIYAASLLRSGVPSRFSGSGSGTDFTLTISSLQPEDFATYYCLQDNNYPRTFGQGTKVEIK

SEQ ID NO: 10 - protein, 107 aa, Homo sapiens
DIQMTQSPSSLSASVGDRVTITCRASQGISSWLAWYQQKPEKAPKSLIYAASSLQSGVPSRFSGSGSGTDFTLTISSLQPEDFATYYCQQYNSYPYTFGQGTKLEIK

SEQ ID NO: 11 - protein, 107 aa, Homo sapiens
DIQMTQSPSSLSASVGDSITITCRASQGISSWLAWYQQKPEKAPKSLIYAASSLQSGVPSRFSGSGSGTDFTLTISSLQPEDFATYYCQQFNSYPYTFGQGTKLEIK

SEQ ID NO: 12 - protein, 107 aa, Homo sapiens
DIQMTQSPSSLSASVGDRVTVTCRSSQGIAHYLAWYQQKPGKVPKVLLYAASTLQSGVPSRFSGSGSGTDFTLTISSLQPEDVATYYCQKYNSAPYTFGQGTKLEIK

SEQ ID NO: 13 - protein, 107 aa, Homo sapiens
EIVMTQSPATLSVSPGERATLSCRASQSVSSNLAWYQQKPGQAPRLLIYGASTRATGIPARFSGSGSGTEFTLTISSLQSEDFAVYYCQQYNNWPFTFGPGTKVDIK

SEQ ID NO: 14 - protein, 107 aa, Homo sapiens
DIQMTQSPSSLSASVGDRVTITCRASQGIRNDLGWYQQKPGKAPKRLIYVASSLQSGVPSRFSGSGSGTEFTLTISSLQPEDFATYYCLQHNSYPLTFGGGTKVEIK

SEQ ID NO: 15 - protein, 107 aa, Homo sapiens
DIQMTQSPSTLSASVGDRVTITCRASQTISSWLAWYQQKPGTAPKLLIYKASSLESGVPSRFSGSGSGTEFTLTISSLQPDDFATYYCQQYNSYSYTFGQGTKLEIK

SEQ ID NO: 16 - protein, 107 aa, Homo sapiens
DIQMTQSPSSLSASVGDRVTITCRTSQDIRNDLGWYQQKPGKAPKRLIYAVSSLQSGVPSRFSGSGSGTEFTFTISSLQPEDFATYYCLQYNTYPFTFGPGTTVDIK

SEQ ID NO: 17 - protein, 107 aa, Homo sapiens
DIQMTQSPSSLSASVGDRVTITCRASQGIRNDLGWYQQKPGKAPKRLIYAASSLQSGVPSRFSGSGSGTEFTLTISSLQPEDFATYYCLQYISYPWTFGQGTKVEIK

SEQ ID NO: 18 - protein, 107 aa, Homo sapiens
AIRMTQSPSSFSASTGDRVTITCRASQGISSYLAWYQQKPGKAPTLLIYAASTLQSGVPSRFSGSGSGTDFTLTISCLQSEDFATYYCQQYYSDPPTFGQGTKVEIK

SEQ ID NO: 19 - protein, 107 aa, Homo sapiens
DIQMTQSPSSLSASVGDRVTITCRASQGIRNDLGWYQQKPGKAPKRLIYAASSLQSGVPSRFSGSGSGTEFTLTISSLQPEDFATYYCLQYKSYLYTFGQGTKLEIK

SEQ ID NO: 20 - protein, 107 aa, Homo sapiens
DIQLTQSPSFLSASVGDRVTITCRASQGISNYLAWYQQKPGKAPKLLIYAASTLQSGVPSRFSGSGSGTEFTLTISSLQPEDFATYYCHQLNSFPLTFGGGTKVEIK

SEQ ID NO: 21 - protein, 107 aa, Homo sapiens
AIQMTQSPSSLSASVGDRVTITCRASQGIRNELGWYQQKPGKAPKLLICAASSLQSGVPSRFSGSGSGTDFTLTISSLQPEDFATYYCLQDYIYPYTFGQGTKLEIK

SEQ ID NO: 22 - protein, 107 aa, Homo sapiens
DIQMTQSPSSLSASVGDRVTITCRASQGIRNDLGWYQQKPGKAPKRLIYAASSLQSGVPSRFSGSGSGTEFTLTISSLQPEDFATYYCLQHNSYPFTFGPGTKVEIK

SEQ ID NO: 23 - protein, 107 aa, Homo sapiens
EIVMTQSPATLSVSPGERATLSCRASQSVSSNLAWYQQKPGQAPRLLIYGASTRATGIPARFSGSGSGTEFTLTISSLQSEDFAVYYCQQYHNWPLTFGGGTKVEIK

SEQ ID NO: 24 - protein, 107 aa, Homo sapiens
EIVMTQSPATLSVFPGERATLSCRASQSVSSNLGWYQQKPGQAPRLLMYGASTRVTGIPARFSGSGSGTEFTLTISSLQSEDFAVYYCQQYNTWPRTFGQGTKVEIK

SEQ ID NO: 25 - protein, 107 aa, Homo sapiens
EIVLTQSPATLSLSPGERATLSCRASQSVSSYLAWYQQKPGQAPRLLIYDASNRATGIPARFSGSGSGTDFTLTISSLEPEDFAVYYCQQRNNWPYTFGQGTKLEIK

SEQ ID NO: 26 - protein, 107 aa, Homo sapiens
DIQMTQSPSSLSASVGDRVTISCRASQGISNYLAWYQQKPGKVPKVLIYGASTLQSGVPSRFSGSGSGTDFTLTISSLQPEDVATYYCQKYNSAPYTFGQGTKLEIK

SEQ ID NO: 27 - protein, 107 aa, Homo sapiens
AIQLTQSPSSLSASVGDRVTITCRASQGISSALAWYQQKPGKAPKLLIYDASSLESGVPSRFSGSGSGTDFTLTISSLQPEDFATYYCQQFNDYALTFGGGTKVEIK

SEQ ID NO: 28 - protein, 107 aa, Homo sapiens
AIQMTQSPSSLSASVGDRVTITCRASQGISSALAWYQQKPGKAPKLLIYAASTLQSGVPSRFSGSGSGTDFTLTISSLQPEDFATYYCLQDYNYPWTFGQGTKVEIK

SEQ ID NO: 29-100 - skipped (72 entries)

SEQ ID NO: 101 - protein, 121 aa, Homo sapiens
QVQLVESGGGVVQPGRSLRLSCAASGFTFSNYGMHWVRQAPGKGLEWVAVIWYDGSNKYYTDSVKGRFTISRDNSKNTLYLQMNSLRAEDTAVYYCAGGGNYYGDYWGQGTLVTVSSAKTT

SEQ ID NO: 102 - protein, 129 aa, Homo sapiens
QVQLVESGGGVVQPGRSLRLSCAASGFTFSSYGMHWVRQAPGKGLEWVALISYDGSNKYYADSVKGRFTISRDNSKNTLYLQMNSLRAEDTAVYYCARGGYFDPYGDYYYGMDVWGQGTTVTVSSAKTT

SEQ ID NO: 103 - protein, 121 aa, Homo sapiens
QVQLVESGGGEVQPGRSLRLSCAASGFTFSDYGMHWVRQAPGKGLEWVAVIWYDGSNKYYADSVKGRFTISRDNSKNTLYLQMNSLRAEDTAVYYCAGGGSYWGDYWGQGTLVTVSSAKTT

SEQ ID NO: 104 - protein, 126 aa, Homo sapiens
QVQLVQSGAEVKKPGASVKVSCKASGYTFATYGVSWVRQAPGQGLEWMGWISAYSDNINYAQNLQGRVTITTDTSTSTAYMELRSLRSDDTAVYYCARDGSHGDYYYGMDVWGQGTTVTVSSAKTT

SEQ ID NO: 105 - protein, 135 aa, Homo sapiens
QVQLVESGGGVVQPGRSLRLSCAASGFTFSNYGTHWVRQAPGKGLEWVAVIWYDGSNKYYADSVKGRFTISRDNSKNTLYLQMNSLRAEDTAVYYCARDRIYCSSTRCIGFGYYYYGMDVWGQGTTVTVSSAKTT

SEQ ID NO: 106 - protein, 121 aa, Homo sapiens
QVQLVESGGGVVQPGRSLRLSCAASGFTFSSYGMHWVRQAPGKGLEWVAVIWYDGSNKYYADSVKGRFTISRDNSKNTLYLQMNSLRAEDTAVYYCAGGGNYWGDFWGQGTLVTVSSAKTT

SEQ ID NO: 107 - protein, 129 aa, Homo sapiens
QVQLVQSGAEVKKPGASVKVSCKASGYTFTSYGINWVRQAPGQGLEWMGWISAYNGNRNYAQNLQGRVTMTSDTSTNTAYMELRSLRSYDTAVYYCARDHYDILTGYYKGGFDYWGQGTLVTVSSAKTT

SEQ ID NO: 108 - protein, 122 aa, Homo sapiens
QVQLVESGGGVVQPGRSLRLSCAASGFTFSSYGMHWVRQAPGKGLEWVAVIWYDGSIKYYADSVKGRFTISRDNSKNTLYLQMNSLRAEDTAVYYCANDILTGSFDYWGQGTLVTVSSAKTT

SEQ ID NO: 109 - protein, 115 aa, Homo sapiens
QVQLVESGGGVVQPGRSLRLSCAASGFTFSNYGMHWVRQAPGKGLEWVAVIWYDGTNKFYADSVKGRFTISRDNSKNTLYLQMNSLRAEDTAVYYCATNSDDYWGQGTLVTVSSA

SEQ ID NO: 110 - protein, 123 aa, Homo sapiens
QVQLVQSGAEVKKPGASVKVSCKASGYTFAIYGISWVRQAPGQGLEWMGWISAYSDNSNYAQKLQGRVTMTTDTSTSTAYMELRSLRSDDTAVYYCVRDGSHGDYYYGMDVWGQGTTVTVSSA

SEQ ID NO: 111 - protein, 123 aa, Homo sapiens
QVQLVQSGAEVKKPGASVKVSCRASGYTFTNYGISWVRQAPGQGLEWMGWISVYSDNTHYPQKLQGRVTMTTDTSTSTAYMELRSLRSDDTAVYYCARDGSHGDYYYVMDLWGQGTTVTVSSA

SEQ ID NO: 112 - protein, 115 aa, Homo sapiens
QVQLVESGGGVVQPGRSLRLSCAASGFTFSSYGMHWVRQAPGKGLEWVAVIWYDGSNKYYADSVKGRFTISRDNSKNTLYLQMNSLRAEDSAVYYCVCNPFDYWGQGTLVTVSSA

SEQ ID NO: 113 - protein, 123 aa, Homo sapiens
QVQLVQSGAEVKKPGASVKVSCKASGYTFTTYGISWVRQAPGQGLEWMGWISAHNGNTNYAQKFQGRVTMTTDTSTSTAYMELRSLRSDDTAVYYCVRDGAVADYYYGMDVWGQGTTVTVSSA

SEQ ID NO: 114 - protein, 118 aa, Homo sapiens
EVQLVESGGGLVQPGGSLRLSCAASGFTFSSYAMSWVRQAPGKGLEWVSAISGSGGSTYYADSVKGRFTISRDNSKNTLYLQMNSLRAEDTAVYYCAKDQWYYFVYWGQGTLVTVSSA

SEQ ID NO: 115 - protein, 118 aa, Homo sapiens
QVQLQESGPGLVKPSETLSLTCTVSGGSISSYYWSWIRQPPGKGLEWIGYIYYSGSTNYNPSLKSRVTISEDTSKNQFSLKLSSVTAADTAVYYCARDEGATFFDYWGQGTLVTVSSA

SEQ ID NO: 116 - protein, 118 aa, Homo sapiens
QVQLVESGGGVVQPGRSLTLSCAASGFTFSNYGMYWVRQAPGKGLEWVAVIWYDGSNKYYADSVKGRFTISRDNSKNTLYLQMNSLRAEDTAVYYCAGGGSYSGDYWGQGTLVTVSSA

SEQ ID NO: 117 - protein, 118 aa, Homo sapiens
QVQLVESGGGVVQPGRSLRLSCAASGFTFSSYGMHWVRQAPGKGLEWVAVIWYDGSNQYYADSVKGRFTISRDNSKNTLFLQMNSLRAEDTAVYFCAGGGNYYGDFWGQGTLVTVSSA

SEQ ID NO: 118 - protein, 127 aa, Homo sapiens
QVQLVQSGTEVKKPGASVKVSCQASGYTFTSYDISWVRRAPGQGLEWMGWISAYNGNTNYAQKLQGRVTLTTDTSTSTAYMELRSLRSDDTAVYYCARRYYDILTEGGYYYVLDVWGQGTTVTVSSA

SEQ ID NO: 119 - protein, 119 aa, Homo sapiens
QVQLVESGGGVVQPGRSLRLSCAASGFTFSNYGMYWVRQAPGKGLEWVAVIWYDGSNKYYADSVKGRFTISRDNSKNTLYLQMNSLRAEDTAVYYCAGGGDILTGDYWGQGTLVTVSSA

SEQ ID NO: 120 - protein, 124 aa, Homo sapiens
EVQLVESGGGLVQPGGSLRLSCAASGFTFSFYDMHWVRQAKGKGLEWVSAIGTAGDTYYPGSVKGRFTISRENAKNSLYLQMNSLRAGDTAVYYCARGYCSTTNCFADYFDYWGQGTLVTVSSA

SEQ ID NO: 121 - protein, 122 aa, Homo sapiens
QVQLVQSGAEVKKPGASVKVSCKASGYTFTSYYMHWVRQAPGQGLEWMGIINPSGSSTSYAQKFQGRVTMTRDTSTSTVYMELSSLRSEDTAVYYCARYGVWGSYRSLDYWGQGTLVTVSSA

SEQ ID NO: 122 - protein, 126 aa, Homo sapiens
QVQLVESGGGVVQPGRSLRLSCAASGFTFSNYGMHWVRQAPGKGLEWVAVIWYDGSNKYYADSVKGRFTISRDNSKNTLYLQMNSLRAEDTAVYYCARLYYYDSSGYYPDAFDIWGQGTMVTVSSA

SEQ ID NO: 123 - protein, 117 aa, Homo sapiens
QVQLVESGGGVVQPGRSLRLSCVASGFTFSNYGMHWVRQAPGKGLEWVAIIWYDGSIKYYADSVKGRFTISRDNSKNTLHLQMNSLRAEDTAVYYCARWGIYFDYWGQGTLVTVSSA

SEQ ID NO: 124 - protein, 114 aa, Homo sapiens
QVQLVESGGGVVQPGRSLRLSCAASGFTFSDSGMHWVRQAPGKGLEWVAVIWYDGSKKYYVDSVKGRFTISRDNSKNTLYLQMNSLRAEDTAVYYCATEGDYWGQGTLVTVSSA

SEQ ID NO: 125 - protein, 119 aa, Homo sapiens
QVQLVESGGGVVQPGRSLRLSCAASGFTFSSYGMHWVRQAPGKGLEWVGVIWYDGSIKYYADSVKGRFTISRDNSMNTLNLQMNSLRAEDTAVYYCAGDILTGSFDYWGQGTLVTVSSA

SEQ ID NO: 126 - protein, 115 aa, Homo sapiens
QVQLVESGGGVVQPGRSLRLSCAASGFTFSDYGMHWVRQAPGKGLEWVAVIWYDGSNKYYTDSVKGRFTISRDNSKNTLYLQMSSLRAEDAAVYYCAVNPFDYWGQGTLVTVSSA

SEQ ID NO: 127 - protein, 114 aa, Homo sapiens
QVQLVQSGAELVRPGTSVKLSCRASGYTFTTYWMHWVKQRPGQGLEWIGVIDPSDSYTYYNQKFKGKATLTVDTSSSTAYMQLSSLTSEDSAVYFCARNWDYWGQGTTLTVSSA

SEQ ID NO: 128 - protein, 122 aa, Homo sapiens
QVQLVESGGGLVKPGGSLKLSCAASGFTFSDYGMHWVRQAPEKGLEWVAYISSGSFAIYYADTVRGRFTISRDSAKNTLFLQMTSLRSEDTAMYYCARRGPYPYYYSMDYWGQGTSVTVSSA

SEQ ID NO: 129-1000 - skipped (872 entries)

SEQ ID NO: 1001 - protein, 6 aa, Homo sapiens
QGIRND

SEQ ID NO: 1002 - protein, 6 aa, Homo sapiens
QAIRND

SEQ ID NO: 1003 - protein, 6 aa, Homo sapiens
QGIRNE

SEQ ID NO: 1004 - protein, 6 aa, Homo sapiens
QGISSW

SEQ ID NO: 1005 - protein, 6 aa, Homo sapiens
QGISSA

SEQ ID NO: 1006 - protein, 6 aa, Homo sapiens
QGIRND

SEQ ID NO: 1007 - protein, 6 aa, Homo sapiens
QSVSSN

SEQ ID NO: 1008 - protein, 6 aa, Homo sapiens
QSVSSY

SEQ ID NO: 1009 - protein, 6 aa, Homo sapiens
QDIRND

SEQ ID NO: 1010 - protein, 6 aa, Homo sapiens
QGISSW

SEQ ID NO: 1011 - protein, 6 aa, Homo sapiens
QGISSW

SEQ ID NO: 1012 - protein, 6 aa, Homo sapiens
QGIAHY

SEQ ID NO: 1013 - protein, 6 aa, Homo sapiens
QSVSSN

SEQ ID NO: 1014 - protein, 6 aa, Homo sapiens
QGIRND

SEQ ID NO: 1015 - protein, 6 aa, Homo sapiens
QTISSW

SEQ ID NO: 1016 - protein, 6 aa, Homo sapiens
QDIRND

SEQ ID NO: 1017 - protein, 6 aa, Homo sapiens
QGIRND

SEQ ID NO: 1018 - protein, 6 aa, Homo sapiens
QGISSY

SEQ ID NO: 1019 - protein, 6 aa, Homo sapiens
QGIRND

SEQ ID NO: 1020 - protein, 6 aa, Homo sapiens
QGISNY

SEQ ID NO: 1021 - protein, 6 aa, Homo sapiens
QGIRNE

SEQ ID NO: 1022 - protein, 6 aa, Homo sapiens
QGIRND

SEQ ID NO: 1023 - protein, 6 aa, Homo sapiens
QSVSSN

SEQ ID NO: 1024 - protein, 6 aa, Homo sapiens
QSVSSN

SEQ ID NO: 1025 - protein, 6 aa, Homo sapiens
QSVSSY

SEQ ID NO: 1026 - protein, 6 aa, Homo sapiens
QGISNY

SEQ ID NO: 1027 - protein, 6 aa, Homo sapiens
QGISSA

SEQ ID NO: 1028 - protein, 6 aa, Homo sapiens
QGISSA

SEQ ID NO: 1029-2000 - skipped (972 entries)

SEQ ID NO: 2001 - protein, 3 aa, Homo sapiens
VAS

SEQ ID NO: 2002 - protein, 3 aa, Homo sapiens
AAS

SEQ ID NO: 2003 - protein, 3 aa, Homo sapiens
AAS

SEQ ID NO: 2004 - protein, 3 aa, Homo sapiens
AAS

SEQ ID NO: 2005 - protein, 3 aa, Homo sapiens
DAS

SEQ ID NO: 2006 - protein, 3 aa, Homo sapiens
AAS

SEQ ID NO: 2007 - protein, 3 aa, Homo sapiens
GSS

SEQ ID NO: 2008 - protein, 3 aa, Homo sapiens
DAS

SEQ ID NO: 2009 - protein, 3 aa, Homo sapiens
AAS

SEQ ID NO: 2010 - protein, 3 aa, Homo sapiens
AAS

SEQ ID NO: 2011 - protein, 3 aa, Homo sapiens
AAS

SEQ ID NO: 2012 - protein, 3 aa, Homo sapiens
AAS

SEQ ID NO: 2013 - protein, 3 aa, Homo sapiens
GAS

SEQ ID NO: 2014 - protein, 3 aa, Homo sapiens
VAS

SEQ ID NO: 2015 - protein, 3 aa, Homo sapiens
KAS

SEQ ID NO: 2016 - protein, 3 aa, Homo sapiens
AVS

SEQ ID NO: 2017 - protein, 3 aa, Homo sapiens
AAS

SEQ ID NO: 2018 - protein, 3 aa, Homo sapiens
AAS

SEQ ID NO: 2019 - protein, 3 aa, Homo sapiens
AAS

SEQ ID NO: 2020 - protein, 3 aa, Homo sapiens
AAS

SEQ ID NO: 2021 - protein, 3 aa, Homo sapiens
AAS

SEQ ID NO: 2022 - protein, 3 aa, Homo sapiens
AAS

SEQ ID NO: 2023 - protein, 3 aa, Homo sapiens
GAS

SEQ ID NO: 2024 - protein, 3 aa, Homo sapiens
GAS

SEQ ID NO: 2025 - protein, 3 aa, Homo sapiens
DAS

SEQ ID NO: 2026 - protein, 3 aa, Homo sapiens
GAS

SEQ ID NO: 2027 - protein, 3 aa, Homo sapiens
DAS

SEQ ID NO: 2028 - protein, 3 aa, Homo sapiens
AAS

SEQ ID NO: 2029-3000 - skipped (972 entries)

SEQ ID NO: 3001 - protein, 9 aa, Homo sapiens
LQHNSYPLT

SEQ ID NO: 3002 - protein, 9 aa, Homo sapiens
LQHNSFPWT

SEQ ID NO: 3003 - protein, 9 aa, Homo sapiens
LQHYIYPWT

SEQ ID NO: 3004 - protein, 9 aa, Homo sapiens
QQYNSYPYT

SEQ ID NO: 3005 - protein, 9 aa, Homo sapiens
QQFNNYPWT

SEQ ID NO: 3006 - protein, 9 aa, Homo sapiens
LQHNSYPWT

SEQ ID NO: 3007 - protein, 9 aa, Homo sapiens
QQYNNWPYT

SEQ ID NO: 3008 - protein, 9 aa, Homo sapiens
QQRNTWPYT

SEQ ID NO: 3009 - protein, 9 aa, Homo sapiens
LQDNNYPRT

SEQ ID NO: 3010 - protein, 9 aa, Homo sapiens
QQYNSYPYT

SEQ ID NO: 3011 - protein, 9 aa, Homo sapiens
QQFNSYPYT

SEQ ID NO: 3012 - protein, 9 aa, Homo sapiens
QKYNSAPYT

SEQ ID NO: 3013 - protein, 9 aa, Homo sapiens
QQYNNWPFT

SEQ ID NO: 3014 - protein, 9 aa, Homo sapiens
LQHNSYPLT

SEQ ID NO: 3015 - protein, 9 aa, Homo sapiens
QQYNSYSYT

SEQ ID NO: 3016 - protein, 9 aa, Homo sapiens
LQYNTYPFT

SEQ ID NO: 3017 - protein, 9 aa, Homo sapiens
LQYISYPWT

SEQ ID NO: 3018 - protein, 9 aa, Homo sapiens
QQYYSDPPT

SEQ ID NO: 3019 - protein, 9 aa, Homo sapiens
LQYKSYLYT

SEQ ID NO: 3020 - protein, 9 aa, Homo sapiens
HQLNSFPLT

SEQ ID NO: 3021 - protein, 9 aa, Homo sapiens
LQDYIYPYT

SEQ ID NO: 3022 - protein, 9 aa, Homo sapiens
LQHNSYPFT

SEQ ID NO: 3023 - protein, 9 aa, Homo sapiens
QQYHNWPLT

SEQ ID NO: 3024 - protein, 9 aa, Homo sapiens
QQYNTWPRT

SEQ ID NO: 3025 - protein, 9 aa, Homo sapiens
QQRNNWPYT

SEQ ID NO: 3026 - protein, 9 aa, Homo sapiens
QKYNSAPYT

SEQ ID NO: 3027 - protein, 9 aa, Homo sapiens
QQFNDYALT

SEQ ID NO: 3028 - protein, 9 aa, Homo sapiens
LQDYNYPWT

SEQ ID NO: 3029-4000 - skipped (972 entries)

SEQ ID NO: 4001 - protein, 8 aa, Homo sapiens
GFTFSNYG

SEQ ID NO: 4002 - protein, 8 aa, Homo sapiens
GFTFSSYG

SEQ ID NO: 4003 - protein, 8 aa, Homo sapiens
GFTFSDYG

SEQ ID NO: 4004 - protein, 8 aa, Homo sapiens
GYTFATYG

SEQ ID NO: 4005 - protein, 8 aa, Homo sapiens
GFTFSNYG

SEQ ID NO: 4006 - protein, 8 aa, Homo sapiens
GFTFSSYG

SEQ ID NO: 4007 - protein, 8 aa, Homo sapiens
GYTFTSYG

SEQ ID NO: 4008 - protein, 8 aa, Homo sapiens
GFTFSSYG

SEQ ID NO: 4009 - protein, 8 aa, Homo sapiens
GFTFSNYG

SEQ ID NO: 4010 - protein, 8 aa, Homo sapiens
GYTFAIYG

SEQ ID NO: 4011 - protein, 8 aa, Homo sapiens
GYTFTNYG

SEQ ID NO: 4012 - protein, 8 aa, Homo sapiens
GFTFSSYG

SEQ ID NO: 4013 - protein, 8 aa, Homo sapiens
GYTFTTYG

SEQ ID NO: 4014 - protein, 8 aa, Homo sapiens
GFTFSSYA

SEQ ID NO: 4015 - protein, 8 aa, Homo sapiens
GGSISSYY

SEQ ID NO: 4016 - protein, 8 aa, Homo sapiens
GFTFSNYG

SEQ ID NO: 4017 - protein, 8 aa, Homo sapiens
GFTFSSYG

SEQ ID NO: 4018 - protein, 8 aa, Homo sapiens
GYTFTSYD

SEQ ID NO: 4019 - protein, 8 aa, Homo sapiens
GFTFSNYG

SEQ ID NO: 4020 - protein, 8 aa, Homo sapiens
GFTFSFYD

SEQ ID NO: 4021 - protein, 8 aa, Homo sapiens
GYTFTSYY

SEQ ID NO: 4022 - protein, 8 aa, Homo sapiens
GFTFSNYG

SEQ ID NO: 4023 - protein, 8 aa, Homo sapiens
GFTFSNYG

SEQ ID NO: 4024 - protein, 8 aa, Homo sapiens
GFTFSDSG

SEQ ID NO: 4025 - protein, 8 aa, Homo sapiens
GFTFSSYG

SEQ ID NO: 4026 - protein, 8 aa, Homo sapiens
GFTFSDYG

SEQ ID NO: 4027 - protein, 8 aa, Homo sapiens
GYTFTTYW

SEQ ID NO: 4028 - protein, 8 aa, Homo sapiens
GFTFSDYG

SEQ ID NO: 4029-5000 - skipped (972 entries)

SEQ ID NO: 5001 - protein, 8 aa, Homo sapiens
IWYDGSNK

SEQ ID NO: 5002 - protein, 8 aa, Homo sapiens
ISYDGSNK

SEQ ID NO: 5003 - protein, 8 aa, Homo sapiens
IWYDGSNK

SEQ ID NO: 5004 - protein, 8 aa, Homo sapiens
ISAYSDNI

SEQ ID NO: 5005 - protein, 8 aa, Homo sapiens
IWYDGSNK

SEQ ID NO: 5006 - protein, 8 aa, Homo sapiens
IWYDGSNK

SEQ ID NO: 5007 - protein, 8 aa, Homo sapiens
ISAYNGNR

SEQ ID NO: 5008 - protein, 8 aa, Homo sapiens
IWYDGSIK

SEQ ID NO: 5009 - protein, 8 aa, Homo sapiens
IWYDGTNK

SEQ ID NO: 5010 - protein, 8 aa, Homo sapiens
ISAYSDNS

SEQ ID NO: 5011 - protein, 8 aa, Homo sapiens
ISVYSDNT

SEQ ID NO: 5012 - protein, 8 aa, Homo sapiens
IWYDGSNK

SEQ ID NO: 5013 - protein, 8 aa, Homo sapiens
ISAHNGNT

SEQ ID NO: 5014 - protein, 8 aa, Homo sapiens
ISGSGGST

SEQ ID NO: 5015 - protein, 7 aa, Homo sapiens
IYYSGST

SEQ ID NO: 5016 - protein, 8 aa, Homo sapiens
IWYDGSNK

SEQ ID NO: 5017 - protein, 8 aa, Homo sapiens
IWYDGSNQ

SEQ ID NO: 5018 - protein, 8 aa, Homo sapiens
ISAYNGNT

SEQ ID NO: 5019 - protein, 8 aa, Homo sapiens
IWYDGSNK

SEQ ID NO: 5020 - protein, 7 aa, Homo sapiens
IGTAGDT

SEQ ID NO: 5021 - protein, 8 aa, Homo sapiens
INPSGSST

SEQ ID NO: 5022 - protein, 8 aa, Homo sapiens
IWYDGSNK

SEQ ID NO: 5023 - protein, 8 aa, Homo sapiens
IWYDGSIK

SEQ ID NO: 5024 - protein, 8 aa, Homo sapiens
IWYDGSKK

SEQ ID NO: 5025 - protein, 8 aa, Homo sapiens
IWYDGSIK

SEQ ID NO: 5026 - protein, 8 aa, Homo sapiens
IWYDGSNK

SEQ ID NO: 5027 - protein, 8 aa, Homo sapiens
IDPSDSYT

SEQ ID NO: 5028 - protein, 8 aa, Homo sapiens
ISSGSFAI

SEQ ID NO: 5029-6000 - skipped (972 entries)

SEQ ID NO: 6001 - protein, 10 aa, Homo sapiens
AGGGNYYGDY

SEQ ID NO: 6002 - protein, 18 aa, Homo sapiens
ARGGYFDPYGDYYYGMDV

SEQ ID NO: 6003 - protein, 10 aa, Homo sapiens
AGGGSYWGDY

SEQ ID NO: 6004 - protein, 15 aa, Homo sapiens
ARDGSHGDYYYGMDV

SEQ ID NO: 6005 - protein, 24 aa, Homo sapiens
ARDRIYCSSTRCIGFGYYYYGMDV

SEQ ID NO: 6006 - protein, 10 aa, Homo sapiens
AGGGNYWGDF

SEQ ID NO: 6007 - protein, 18 aa, Homo sapiens
ARDHYDILTGYYKGGFDY

SEQ ID NO: 6008 - protein, 11 aa, Homo sapiens
ANDILTGSFDY

SEQ ID NO: 6009 - protein, 7 aa, Homo sapiens
ATNSDDY

SEQ ID NO: 6010 - protein, 15 aa, Homo sapiens
VRDGSHGDYYYGMDV

SEQ ID NO: 6011 - protein, 15 aa, Homo sapiens
ARDGSHGDYYYVMDL

SEQ ID NO: 6012 - protein, 7 aa, Homo sapiens
VCNPFDY

SEQ ID NO: 6013 - protein, 15 aa, Homo sapiens
VRDGAVADYYYGMDV

SEQ ID NO: 6014 - protein, 10 aa, Homo sapiens
AKDQWYYFVY

SEQ ID NO: 6015 - protein, 11 aa, Homo sapiens
ARDEGATFFDY

SEQ ID NO: 6016 - protein, 10 aa, Homo sapiens
AGGGSYSGDY

SEQ ID NO: 6017 - protein, 10 aa, Homo sapiens
AGGGNYYGDF

SEQ ID NO: 6018 - protein, 19 aa, Homo sapiens
ARRYYDILTEGGYYYVLDV

SEQ ID NO: 6019 - protein, 11 aa, Homo sapiens
AGGGDILTGDY

SEQ ID NO: 6020 - protein, 17 aa, Homo sapiens
ARGYCSTTNCFADYFDY

SEQ ID NO: 6021 - protein, 14 aa, Homo sapiens
ARYGVWGSYRSLDY

SEQ ID NO: 6022 - protein, 18 aa, Homo sapiens
ARLYYYDSSGYYPDAFDI

SEQ ID NO: 6023 - protein, 9 aa, Homo sapiens
ARWGIYFDY

SEQ ID NO: 6024 - protein, 6 aa, Homo sapiens
ATEGDY

SEQ ID NO: 6025 - protein, 11 aa, Homo sapiens
AGDILTGSFDY

SEQ ID NO: 6026 - protein, 7 aa, Homo sapiens
AVNPFDY

SEQ ID NO: 6027 - protein, 6 aa, Homo sapiens
ARNWDY

SEQ ID NO: 6028 - protein, 14 aa, Homo sapiens
ARRGPYPYYYSMDY

SEQ ID NO: 6029-7000 - skipped (972 entries)

SEQ ID NO: 7001 - protein, 288 aa, Homo sapiens
MQIPQAPWPVVWAVLQLGWRPGWFLDSPDRPWNPPTFSPALLVVTEGDNATFTCSFSNTSESFVLNWYRMSPSNQTDKLAAFPEDRSQPGQDCRFRVTQLPNGRDFHMSVVRARRNDSGTYLCGAISLAPKAQIKESLRAELRVTERRAEVPTAHPSPSPRPAGQFQTLVVGVVGGLLGSLVLLVWVLAVICSRAARGTIGARRTGQPLKEDPSAVPVFSVDYGELDFQWREKTPEPPVPCVPEQTEYATIVFPSGMGTSSPARRGSADGPRSAQPLRPEDGHCSWPL

SEQ ID NO: 7002-7999 - skipped (998 entries)

SEQ ID NO: 8000 - protein, 107 aa, Homo sapiens
  Light chain
DIQLTQSPSFLSASVGDRVTITCRASQGISSYLVWYQQKPGKAPKLLIYAASTLQSGVPSRFSGSGSGTEFTLTISSLQPEDFATYYCQQLNSYPYTFGQGTKLEIK

SEQ ID NO: 8001 - protein, 107 aa, Homo sapiens
  Light chain
DIQMTQSPSSLSASVGDRVTITCRASQGISNYLAWFQQKPGKAPKSLIYAASSLQSGVPSKFSGSGSGTDFTLTISSLQPEDFATYYCQQYNSYPYTFGQGTKLEIK

SEQ ID NO: 8002 - protein, 107 aa, Homo sapiens
  Light chain
DIQLTQSPSFLSASVGDRVTITCRASQGISSYLAWYQQKPGKAPKLLIYAASTLQSGVPSRFSGSGSGTEFTLTISSLQPEDFATYYCQQLNSYPRTFGQGTKVEIK

SEQ ID NO: 8003 - protein, 107 aa, Homo sapiens
  Light chain
DIQMTQSPSSLSASVGDRVTITCRASQGINNYLAWFQQKPGKAPKSLIYAASSLQSGVPSKFSGSGSGTDFTLTISSLQPEDFATYYCQQYNSYPLTFGGGTKVEIK

SEQ ID NO: 8004 - protein, 107 aa, Homo sapiens; identical to SEQ ID NO: 8000
  Light chain

SEQ ID NO: 8005 - protein, 107 aa, Homo sapiens
  Light chain
EIVLTQSPATLSLSPGERATLSCGASQSVSSSYLAWYQQKPGLAPRLLIYDASSRATGIPDRFSGSGSGTDFTLTISRLEPEDFAVYYCQQYGSSPTFGQGTKLEIK

SEQ ID NO: 8006 - protein, 107 aa, Homo sapiens
  Light chain
EIVLTQSPDFQSVTPKEKVTITCRASQSIGSSLHWYQQKPDQSPKLLIKYASQSFSGVPSRFSGSGSGTDFTLTINSLEAEDAATYYCHQSSSLPHTFGKGTKLEIK

SEQ ID NO: 8007 - protein, 107 aa, Homo sapiens; identical to SEQ ID NO: 8000
  Light chain

SEQ ID NO: 8008 - protein, 107 aa, Homo sapiens
  Light chain
DIQMTQSPSSLSASVGDRVTITCRASQGIRNDLGWYQQKPGKAPTRLIYAASSLQSGVPSRFSGSGSGTEFTLTISSLQPEDFATYYCLQHNSYPYTFGQGTKLEIK

SEQ ID NO: 8009 - protein, 108 aa, Homo sapiens
  Light chain
EIVLTQSPGTLSLSPGERATLSCRASQSVSSSYLAWYQQKPGQAPRLLIYGASSRATGIPDRFSGSGSGTDFTLTISRLEPEDFAVYYCQQYGSSPYTFGQGTKLEIK

SEQ ID NO: 8010 - protein, 107 aa, Homo sapiens
  Light chain
DIQMTQSPSSLSASVGDRVTITCRASQGINNYLAWFQQKPGKAPKSLIYAASSLQSGVPSKFSGSGSGTDFTLTISSLQPEDFATYYCQQYKSYPLTFGGGTKVEIK

SEQ ID NO: 8011 - protein, 107 aa, Homo sapiens
  Light chain
DIQMTQSPSSLSASVGDRVTITCRASQGIRNDLGWYQQKPGKAPKRLIYAASSLQSGVPSRFSGSGSGTEFTLTISSLQPEDFATYYCLQHNSYPWTFGQGTKVEIK

SEQ ID NO: 8012 - protein, 107 aa, Homo sapiens
  Light chain
AIQMTQSPSSLSASVGDRVTITCRASQGIGNDLGWFQQKPGKAPNLLIYAASSLQSGVPSRFSGSGSGTDFTLTISSLQPEDFATYYCLQDYNFPRTFGQGTKVEIK

SEQ ID NO: 8013 - protein, 107 aa, Homo sapiens; identical to SEQ ID NO: 8003
  Light chain

SEQ ID NO: 8014 - protein, 107 aa, Homo sapiens; identical to SEQ ID NO: 8000
  Light chain

SEQ ID NO: 8015 - protein, 107 aa, Homo sapiens; identical to SEQ ID NO: 8000
  Light chain

SEQ ID NO: 8016 - protein, 107 aa, Homo sapiens
  Light chain
DIQMTQSPSSLSASVGDRVTITCRASQSISSYLNWYQQKPGKAPKLLIYAASSLQSGVPSRFSGSGSGTDFTLTISSLQPEDFATYYCQQSYSTPYTFGQGTKLEIK

SEQ ID NO: 8017 - protein, 107 aa, Homo sapiens
  Light chain
DIQLTQSPSFLSASVGDRVTITCRASQGISSYLAWYQQKPGKAPKLLIYAASTLQSGVPSRFSGSGSGTEFTLTISSLQPEDFATYYCQQLNSYPFTFGPGTKVDIK

SEQ ID NO: 8018 - protein, 107 aa, Homo sapiens; identical to SEQ ID NO: 8001
  Light chain

SEQ ID NO: 8019 - protein, 107 aa, Homo sapiens; identical to SEQ ID NO: 8002
  Light chain

SEQ ID NO: 8020 - protein, 107 aa, Homo sapiens; identical to SEQ ID NO: 8000
  Light chain

SEQ ID NO: 8021 - protein, 107 aa, Homo sapiens; identical to SEQ ID NO: 8003
  Light chain

SEQ ID NO: 8022 - protein, 107 aa, Homo sapiens; identical to SEQ ID NO: 8000
  Light chain

SEQ ID NO: 8023 - protein, 107 aa, Homo sapiens; identical to SEQ ID NO: 8005
  Light chain

SEQ ID NO: 8024 - protein, 107 aa, Homo sapiens; identical to SEQ ID NO: 8006
  Light chain

SEQ ID NO: 8025 - protein, 107 aa, Homo sapiens; identical to SEQ ID NO: 8000
  Light chain

SEQ ID NO: 8026 - protein, 107 aa, Homo sapiens; identical to SEQ ID NO: 8001
  Light chain

SEQ ID NO: 8027 - protein, 107 aa, Homo sapiens
  Light chain
DIQMTQSPSSLSASVGDRVTITCQASQDISNYLNWYQQKPGKAPKLLIYDASNLETGVPSRFSGSGSGTDFTFTISSLQPEDIATYYCQQYDNLPLTFGGGTKVEIK

SEQ ID NO: 8028 - protein, 107 aa, Homo sapiens; identical to SEQ ID NO: 8000
  Light chain

SEQ ID NO: 8029 - protein, 107 aa, Homo sapiens; identical to SEQ ID NO: 8005
  Light chain

SEQ ID NO: 8030 - protein, 107 aa, Homo sapiens; identical to SEQ ID NO: 8000
  Light chain

SEQ ID NO: 8031 - protein, 107 aa, Homo sapiens
  Light chain
EIVLTQSPDFQSVTPKEKVTITCRASQSIGSSLHWYQQKPDQSPKLLIKYASQSISGVPSRFSGSGSGTDFTLTINSLEAEDAAAYYCHQSSSLPYTFGQGTKLEIK

SEQ ID NO: 8032 - protein, 107 aa, Homo sapiens; identical to SEQ ID NO: 8000
  Light chain

SEQ ID NO: 8033 - protein, 107 aa, Homo sapiens; identical to SEQ ID NO: 8002
  Light chain

SEQ ID NO: 8034 - protein, 107 aa, Homo sapiens; identical to SEQ ID NO: 8000
  Light chain

SEQ ID NO: 8035 - protein, 107 aa, Homo sapiens; identical to SEQ ID NO: 8000
  Light chain

SEQ ID NO: 8036 - protein, 107 aa, Homo sapiens
  Light chain
DIQMTQSPSSLSASVGDRVTITCRASQGINNYLAWFQQKPGKAPKSLIYAASSLQSGVPSKFSGSGSGTDFTLTISSLQPEDFATYYCQQYTSYPYTFGQGTKVEIK

SEQ ID NO: 8037 - protein, 107 aa, Homo sapiens
  Light chain
DIQMTQSPSSLSASVGDRVTITCRASQGISSWLAWYQQKPEKAPKSLIYAASSLQSGVPSRFSGSGSGTDFTLTISSLQPEDFATYYCQQYNSYPFTFGPGTKVDIK

SEQ ID NO: 8038 - protein, 107 aa, Homo sapiens; identical to SEQ ID NO: 8002
  Light chain

SEQ ID NO: 8039 - protein, 108 aa, Homo sapiens; identical to SEQ ID NO: 8009
  Light chain

SEQ ID NO: 8040 - protein, 108 aa, Homo sapiens
  Light chain
EIVLTQSPATLSLSPGERATLSCGASQSVSSSYLAWYQQKPGLAPRLLIYDASSRATGIPDRFSGSGSGTDFTLTISRLEPEDFAVYYCQQYGSSPRTFGQGTKVEIK

SEQ ID NO: 8041 - protein, 107 aa, Homo sapiens; identical to SEQ ID NO: 8005
  Light chain

SEQ ID NO: 8042 - protein, 107 aa, Homo sapiens; identical to SEQ ID NO: 8003
  Light chain

SEQ ID NO: 8043 - protein, 107 aa, Homo sapiens; identical to SEQ ID NO: 8010
  Light chain

SEQ ID NO: 8044 - protein, 107 aa, Homo sapiens
  Light chain
DIQMTQSPSSLSASVGDRVTITCRASQGIRNDLGWYQQKPGKAPKRLIYAASSLQSGVPSRFSGSGSGTEFTLTISSLQPEDFATYYCLQHNSYPFTFGPGTKVDIK

SEQ ID NO: 8045 - protein, 107 aa, Homo sapiens
  Light chain
AIQMTQSPSSLSASVGDRVTITCRASQGIRNDLGWYQQKPGKAPKLLIYAASSLQSGVPSRFSGSGSGTDFALTISSLQPEDFATYYCLQDYNYPWTFGQGTKVEIK

SEQ ID NO: 8046 - protein, 107 aa, Homo sapiens; identical to SEQ ID NO: 8006
  Light chain

SEQ ID NO: 8047 - protein, 107 aa, Homo sapiens; identical to SEQ ID NO: 8008
  Light chain

SEQ ID NO: 8048 - protein, 107 aa, Homo sapiens; identical to SEQ ID NO: 8008
  Light chain

SEQ ID NO: 8049 - protein, 107 aa, Homo sapiens
  Light chain
DIQLTQSPSFLSASVGDRVTITCRASQGISSYLAWYQQKPGKAPKLLIYAASTLQSGVPSRFSGSGSGTEFTLTISSLQPEDFATYYCQQLDSYPFTFGPGTKVDIK

SEQ ID NO: 8050 - protein, 107 aa, Homo sapiens
  Light chain
DVVMTQSTAFLSVTPGEKVTITCQASEGIGNYLYWYQQKPDQAPKLLIKFASQSISGVPSRFSGSGSGTDFTFTISSLEAEDAATYYCQQGNKHPWTFGQGTKVEIK

SEQ ID NO: 8051 - protein, 107 aa, Homo sapiens
  Light chain
EIVLTQSPDLQSVTPKEKVTITCRASQSIGSSLHWYQQKPDQSPKLLIKYASQSISGVPSRFSGSGSGTDFTLTINSLEAEDAAAYYCHQSSTLPWTFGQGTKVEIK

SEQ ID NO: 8052 - protein, 107 aa, Homo sapiens; identical to SEQ ID NO: 8010
  Light chain

SEQ ID NO: 8053 - protein, 108 aa, Homo sapiens
  Light chain
EIVMTQSPATLSLSPGERATLSCRASQSVSSSYLSWYQQKPGQAPRLLIYGASTRATGIPARFSGSGSGTDFTLTISSLQPEDFAVYYCQQDYNLPLTFGGGTKVEIK

SEQ ID NO: 8054 - protein, 107 aa, Homo sapiens
  Light chain
DIQMTQSPSSLSASVGDRVTITCRASQGISNYLAWFQQKPGKAPKSLIYAASSLQSGVPSKFSGSGSGTDFTLTISSLQPEDFATYYCQQYNSYPRTFGQGTKVEIK

SEQ ID NO: 8055 - protein, 107 aa, Homo sapiens; identical to SEQ ID NO: 8000
  Light chain

SEQ ID NO: 8056 - protein, 107 aa, Homo sapiens; identical to SEQ ID NO: 8002
  Light chain

SEQ ID NO: 8057 - protein, 107 aa, Homo sapiens; identical to SEQ ID NO: 8000
  Light chain

SEQ ID NO: 8058 - protein, 107 aa, Homo sapiens
  Light chain
DIQMTQSPSSLSASVGDRVTITCRASQGISNYLAWFQQKPGKAPKSLIYAASSLQSGVPSRFSGSGSGTDFTLTISSLQPEDFATYYCLQDYNYPHTFGQGTKLEIK

SEQ ID NO: 8059 - protein, 107 aa, Homo sapiens; identical to SEQ ID NO: 8012
  Light chain

SEQ ID NO: 8060 - protein, 108 aa, Homo sapiens
  Light chain
EIVLTQSPGTLSLSPGERATLSCRASQSVSSSYSAWYQQKPGQAPRLLIYGASSRATGIPDRFSGSGSGTDFTLTISRLEPEDFAVYYCQQYGRSPFTFGPGTKVDFK

SEQ ID NO: 8061 - protein, 108 aa, Homo sapiens; identical to SEQ ID NO: 8009
  Light chain

SEQ ID NO: 8062 - protein, 107 aa, Homo sapiens; identical to SEQ ID NO: 8000
  Light chain

SEQ ID NO: 8063 - protein, 108 aa, Homo sapiens
  Light chain
EIVLTQSPGTLSLSPGERATLSCRASQSVSSSYLAWYQQKPGQAPRLLIYGASSRATGIPDRFSGSGSGTDFTLTISRLEPEDFAVYYCQRYGSSPYTFGQGTKLEIK

SEQ ID NO: 8064 - protein, 107 aa, Homo sapiens
  Light chain
DIQMTQSPSSLSASVGDRVTITCRASQGIRNDLGWYQQKPGKAPKRLIYAASSLQSGVPSRFSGSGSGTEFTLTISSLQPEDFATYYCLQHNSYPYTFGQGTKLEIK

SEQ ID NO: 8065 - protein, 107 aa, Homo sapiens
  Light chain
DIQMTQSPSSLSASVGDRVTITCRASQGISNYLAWFQQKPGKAPKSLIYAASSLQSGVPSKFSGSGSGTDFTLTISSLQPEDFATYYCQQYTSYPYTFGQGTKLEIK

SEQ ID NO: 8066 - protein, 107 aa, Homo sapiens; identical to SEQ ID NO: 8031
  Light chain

SEQ ID NO: 8067 - protein, 107 aa, Homo sapiens
  Light chain
AIQMTQSPSSLSASVGDRVTITCRASQGIRNDLGWYQQKPGKAPKLLIYAASSLQSGVPSRFSGSGSGTDFTLTISSLQPEDFATYYCLQDYNYPRTFGQGTKVEIK

SEQ ID NO: 8068 - protein, 107 aa, Homo sapiens; identical to SEQ ID NO: 8011
  Light chain

SEQ ID NO: 8069 - protein, 107 aa, Homo sapiens
  Light chain
AIQMTQSPSSLSASVGDRVTITCRASQGIRNDLGWYQQKPGKAPKLLIYAASSLQSGVPSRFSGSGSGTDFTLTISSLQPEDFATYFCLQDYNYPPTFGGGTQVEIK

SEQ ID NO: 8070 - protein, 107 aa, Homo sapiens; identical to SEQ ID NO: 8064
  Light chain

SEQ ID NO: 8071 - protein, 107 aa, Homo sapiens; identical to SEQ ID NO: 8064
  Light chain

SEQ ID NO: 8072 - protein, 107 aa, Homo sapiens; identical to SEQ ID NO: 8064
  Light chain

SEQ ID NO: 8073 - protein, 107 aa, Homo sapiens; identical to SEQ ID NO: 8064
  Light chain

SEQ ID NO: 8074 - protein, 107 aa, Homo sapiens; identical to SEQ ID NO: 8064
  Light chain

SEQ ID NO: 8075 - protein, 107 aa, Homo sapiens; identical to SEQ ID NO: 8064
  Light chain

SEQ ID NO: 8076 - protein, 107 aa, Homo sapiens; identical to SEQ ID NO: 8067
  Light chain

SEQ ID NO: 8077 - protein, 107 aa, Homo sapiens; identical to SEQ ID NO: 8064
  Light chain

SEQ ID NO: 8078 - protein, 107 aa, Homo sapiens; identical to SEQ ID NO: 28
  Light chain

SEQ ID NO: 8079 - protein, 107 aa, Homo sapiens
  Light chain
DIQMTQSPSSLSASVGDRVTITCRASQGIRNDLGWYQQKPGKAPKRLIYAASSLQSGVPSRFSGSGSGTDFTLTISSLQPEDFATYYCQQYNSYPYTFGQGTKLEIK

SEQ ID NO: 8080 - protein, 107 aa, Homo sapiens
  Light chain
DIQMTQSPSSLSASVGDRVTITCRASQGIRNDLGWYQQKPGKAPKRLIYAASSLQSGVPSRFSGSGSGTEFTLTISSLQPEDFATYYCLQHNSYPRTFGQGTKVEIK

SEQ ID NO: 8081 - protein, 107 aa, Homo sapiens
  Light chain
DIQMTQSPSSLSASVGDRVTITCRASQGISNYLAWYQQKPGKVPKLLIYAASTLQSGVPSRFSGSGSGTDFTLTISSLQPEDVATYYCQKYNSAPFTFGPGTKVDIK

SEQ ID NO: 8082 - protein, 107 aa, Homo sapiens; identical to SEQ ID NO: 8079
  Light chain

SEQ ID NO: 8083 - protein, 107 aa, Homo sapiens
  Light chain
EIVMTQSPATLSVSPGERATLSCRASQSVSSNLAWYQQKPGQAPRLLIYGASTRATGIPARFSGSGSGTEFTLTISSLQSEDFAVYYCQQYNYWPLTFGGGTKVEIK

SEQ ID NO: 8084 - protein, 108 aa, Homo sapiens
  Light chain
EIVLTQSPGTLSLSPGERATLSCRASQSVSSSYLAWYQQKPGQAPRLLIYGASSRATGIPDRFSGSGSGTDFTLTITRLEPEDFAVYYCQQYGSSPRTFGQGTKVEIK

SEQ ID NO: 8085 - protein, 107 aa, Homo sapiens
  Light chain
DIQMTQSPSSLSASVGDRVTITCRASQGIRNDLGWYQQKPGKAPKLLIYAASTLQSGVPSRFSGSGSGTEFTLTISSLQPEDFATYYCQQLNSYPYTFGQGTKLEIK

SEQ ID NO: 8086 - protein, 107 aa, Homo sapiens; identical to SEQ ID NO: 8064
  Light chain

SEQ ID NO: 8087 - protein, 107 aa, Homo sapiens
  Light chain
AIQMTQSPSSLSASVGDRVTITCRASQGIRNDLGWYQQKPGKAPKLLIYAASSLQSGVPSRFSGSGSGTDFTLTISSLQPEDFATYYCQQLNSYPFTFGPGTKVDIK

SEQ ID NO: 8088 - protein, 107 aa, Homo sapiens; identical to SEQ ID NO: 8079
  Light chain

SEQ ID NO: 8089 - protein, 107 aa, Homo sapiens; identical to SEQ ID NO: 8002
  Light chain

SEQ ID NO: 8090 - protein, 107 aa, Homo sapiens
  Light chain
AIQLTQSPSSLSASVGDRVTITCRASQGISSALAWYQQKPGKAPKLLIYDASSLESGVPSRFSGSGSGTDFTLTISSLQPEDFATYYCQQFNNYPSTFGPGTKVDIK

SEQ ID NO: 8091 - protein, 107 aa, Homo sapiens; identical to SEQ ID NO: 8079
  Light chain

SEQ ID NO: 8092 - protein, 107 aa, Homo sapiens; identical to SEQ ID NO: 8079
  Light chain

SEQ ID NO: 8093 - protein, 107 aa, Homo sapiens; identical to SEQ ID NO: 8079
  Light chain

SEQ ID NO: 8094 - protein, 107 aa, Homo sapiens
  Light chain
EIVLTQSPSFLSASVGDRVTITCRASQGIGSSLHWYQQKPDQSPKVLIKYASQSFSGVPSRFSGSGSGTDFTLTINSLEAEDAATYYCHQSSSLPYTFGQGTKLEIK

SEQ ID NO: 8095 - protein, 107 aa, Homo sapiens; identical to SEQ ID NO: 8079
  Light chain

SEQ ID NO: 8096 - protein, 107 aa, Homo sapiens
  Light chain
DIQMTQSPSSLSASVGDRVTITCRASQGISNYLAWYQQKPGKVPKLLIYAASTLQSGVPSRFSGSGSGTDFTLTISSLQPEDVATYYCQKYNSGPFTFGPGTKVDIK

SEQ ID NO: 8097 - protein, 107 aa, Homo sapiens; identical to SEQ ID NO: 8079
  Light chain

SEQ ID NO: 8098 - protein, 107 aa, Homo sapiens; identical to SEQ ID NO: 8079
  Light chain

SEQ ID NO: 8099 - protein, 107 aa, Homo sapiens; identical to SEQ ID NO: 8079
  Light chain

SEQ ID NO: 8100 - protein, 107 aa, Homo sapiens; identical to SEQ ID NO: 8079
  Light chain

SEQ ID NO: 8101 - protein, 107 aa, Homo sapiens
  Light chain
AIQLTQSPSSLSASVGDRVTITCRASQGISSALAWYQQKPGKAPKLLIYDASSLESGVPSRFSGSGSGTDFTLTISSLQPEDFATYYCQQFNNYALTFGGGTKVEIK

SEQ ID NO: 8102 - protein, 107 aa, Homo sapiens
  Light chain
EIVMTQSPATLSVSPGERATLSCRASQSVSSNLAWYQQKPGQAPRLLIYGASTRATGIPARFSGSGSGTEFTLTISSLQSEDFAVYYCQQYNNWPLTFGGGTKVEIK

SEQ ID NO: 8103 - protein, 107 aa, Homo sapiens; identical to SEQ ID NO: 8080
  Light chain

SEQ ID NO: 8104 - protein, 107 aa, Homo sapiens; identical to SEQ ID NO: 26
  Light chain

SEQ ID NO: 8105 - protein, 107 aa, Homo sapiens
  Light chain
DIQMTQSPSSLSASVGDRVTITCRASQVIRNDLGWYQQKPGKAPKRLIYTTSSLQSGVPSRFSGSGSGTEFTLTISSLQPEDFATYYCLQHNSYPWTFGQGTKVEIK

SEQ ID NO: 8106 - protein, 107 aa, Homo sapiens
  Light chain
DIQMTQSPSSLSASVGDRVTISCRASQGISNYLAWYQQKPGKVPKVLIYGASTLQSGVPSRFSGSGSGTDFTLTISSLQPEDVATYYCQKYNGAPYTFGQGTKLEIK

SEQ ID NO: 8107 - protein, 107 aa, Homo sapiens
  Light chain
EIVLTQSPATLSLSPGERATLSCRASQSVSSYLAWYQQKPGQAPRLLIYDASNRATGIPARFSGSGSGTDFTLTISSLEPEDFAVYYCQQRSNWPYTFGQGTKLEIK

SEQ ID NO: 8108 - protein, 107 aa, Homo sapiens
  Light chain
DIQMTQSPSSLSASVGDRVTITCRASQGISNYLAWYQQKPGKVPKVLIYGASTLQSGVPSRFSGSGSGTDFTLTISSLQPEDVATYYCQKYNSDPYTFGQGTKLEIK

SEQ ID NO: 8109 - protein, 107 aa, Homo sapiens
  Light chain
DIQLTQSPATLSVSPGERATLSCRASQSVSSNLAWYQQKPGQAPRLLIYGASTLQSGVPSRFSGSGSGTEFTLTISSLQPEDFATYYCQQLNSYPRTFGQGTKVEIK

SEQ ID NO: 8110 - protein, 107 aa, Homo sapiens
  Light chain
DIQMTQSPSSLSASVGDRVTISCRASQGISNYLAWYQQKPGKVPKVLIYGASTLQSGVPSRFSGSGSGTDFTLTISSLQPEDVATYYCQKYNSAPYAFGQGTKLEIK

SEQ ID NO: 8111 - protein, 107 aa, Homo sapiens
  Light chain
DIQMTQSPSSLSASVGDRVTITCRASQGIRNDLGWYQQKPGKAPKRLIYAASSLQSGVPSRFSGSGSGTEFTLTISSLQPEDFATYYCLQHNSYPLTFGGGTKVEIK

SEQ ID NO: 8112 - protein, 108 aa, Homo sapiens
  Light chain
EIVMTQSPATLSLSPGERATLSCRASQSVSSSYLSWYQQKPGQAPRLLIYGASTRATGIPARFSGSGSGTDFTLTISSLQPEDFAVYYCQQDYNLSFTFGQGTKLEIK

SEQ ID NO: 8113 - protein, 107 aa, Homo sapiens; identical to SEQ ID NO: 26
  Light chain

SEQ ID NO: 8114 - protein, 107 aa, Homo sapiens
  Light chain
EIVLTQSPATLSLSPGERATLSCRASQSVSSYLAWYQQKPGQAPRLLIYDASNRATGIPARFSGSGSGTDFTLTISSLEPEDFAVYYCQHRSNWLRTFGQGTKVEIK

SEQ ID NO: 8115 - protein, 107 aa, Homo sapiens
  Light chain
DIQMTQSPSSLSASVGDRVTISCRASQGISNYLAWYQQKPGKVPKVLIYGASTLQSGVPSRFSGSGSGTDFTLTISSLQPEDVATYYCQKCNSAPYTFGQGTKLEIK

SEQ ID NO: 8116 - protein, 107 aa, Homo sapiens; identical to SEQ ID NO: 24
  Light chain

SEQ ID NO: 8117 - protein, 107 aa, Homo sapiens
  Light chain
DIQMTQSPSTLSASVGDRVTITCRASQSIISWLAWYQQKPGKAPKLLIYKASRLESGVPSRFSGSGSGTEFTLTISSLQPDDFATYYCQQYNSYSYTFGQGTKLEIK

SEQ ID NO: 8118 - protein, 107 aa, Homo sapiens; identical to SEQ ID NO: 8117
  Light chain

SEQ ID NO: 8119 - protein, 107 aa, Homo sapiens; identical to SEQ ID NO: 25
  Light chain

SEQ ID NO: 8120 - protein, 107 aa, Homo sapiens; identical to SEQ ID NO: 25
  Light chain

SEQ ID NO: 8121 - protein, 107 aa, Homo sapiens
  Light chain
AIQMTQSPSSLSASVGDRVTITCRASQGIRSDLGWYQQKPGKAPKLLIYAASSLQSGVPSRFSGNGSGTDFTLTISSLQPEDFATYYCLQDYNYPYTFGQGTKLEIK

SEQ ID NO: 8122 - protein, 107 aa, Homo sapiens
  Light chain
DIQMTQSPSSLSASVGDRVTITCRASQVISNYLAWYQQKPGKVPKVLIYAASTLQSGVPSRFSGSGSGTVFTLTISSLQPEDVATYYCQNHNSAPYTFGQGTKLEVN

SEQ ID NO: 8123 - protein, 107 aa, Homo sapiens
  Light chain
DIQMTQSPSSLSASVGDRVTITCRASQGISTYLAWYQQRPGKVPQVLIFDASTLQSGVPSRFSGSGSGTDFTLTISSLQPEDVATYYCQKYNSAPYTFGQGTKLEIK

SEQ ID NO: 8124 - protein, 107 aa, Homo sapiens
  Light chain
DIQMTQSPSTLSASVGDRVTITCRASQSVSSWLAWYQQKPGKAPKLLIYRASTLESGVPSRFSGSGSGTEFTLTISSLQPDDFATYYCQQYNNYSYTFGQGTKLEIK

SEQ ID NO: 8125 - protein, 107 aa, Homo sapiens; identical to SEQ ID NO: 24
  Light chain

SEQ ID NO: 8126 - protein, 107 aa, Homo sapiens; identical to SEQ ID NO: 25
  Light chain

SEQ ID NO: 8127 - protein, 107 aa, Homo sapiens
  Light chain
EIVMTQSPATLSLSPGERATLSCRASQSISSSYLSWYQQKPGQAPRLLIYGASTRATGIPARFSGSGSGTDFTLTISSLQPEDFAVYYCQQDYNLYTFGQGTKLEIK

SEQ ID NO: 8128 - protein, 107 aa, Homo sapiens; identical to SEQ ID NO: 24
  Light chain

SEQ ID NO: 8129 - protein, 107 aa, Homo sapiens; identical to SEQ ID NO: 24
  Light chain

SEQ ID NO: 8130 - protein, 107 aa, Homo sapiens; identical to SEQ ID NO: 24
  Light chain

SEQ ID NO: 8131 - protein, 107 aa, Homo sapiens; identical to SEQ ID NO: 24
  Light chain

SEQ ID NO: 8132 - protein, 107 aa, Homo sapiens; identical to SEQ ID NO: 24
  Light chain

SEQ ID NO: 8133 - protein, 107 aa, Homo sapiens; identical to SEQ ID NO: 8117
  Light chain

SEQ ID NO: 8134 - protein, 107 aa, Homo sapiens; identical to SEQ ID NO: 24
  Light chain

SEQ ID NO: 8135 - protein, 107 aa, Homo sapiens; identical to SEQ ID NO: 24
  Light chain

SEQ ID NO: 8136 - protein, 107 aa, Homo sapiens
  Light chain
AIQMTQSPSSLSASVGDRVTITCRASQDIRNDLGWYQQKPGKAPERLIYAASSLQSGVPSRFSGSGSGTDFTLTISSLQPEDFATYYCLQDYNYPWTFGQGTKVEIK

SEQ ID NO: 8137 - protein, 107 aa, Homo sapiens
  Light chain
AIQMTQSPSSLSASVGDRVTITCRASQGIRNDLGWYQQKPGKAPKLLIYAASSLQSGVPSRFSGSGSGTDFTLTISSLQPEDLATYYCLQDYNYPYTFGQGTKLEIK

SEQ ID NO: 8138 - protein, 107 aa, Homo sapiens
  Light chain
AIQMTQSPSSLSASVGDRVTITCRASQDIRNDLGWYQQTPGKAPKLLIYAASSLQSGVPSRFSGSGSGTDFTLTISSLQPEDFATYYCLQDYNYPRTFGQGTKVEIK

SEQ ID NO: 8139 - protein, 107 aa, Homo sapiens
  Light chain
AIQMTQSPSSLSASVGERVTITCRASQGIRNDLGWYQQKPGKAPKLLIYAASSLQSGVPSRFSGSGSGTDFTLTISSLQPEDFATYYCLQDYTYPRTFGQGTKVEVK

SEQ ID NO: 8140 - protein, 107 aa, Homo sapiens
  Light chain
DIQMTQSPSSLSASVGDRVTITCRASQDIRNDLGWYQQKPGKAPERLIYAASSLQSGVPSRFSGSGSGTEFTLTISSLQPEDFATYYCLQHNSYPRTFGQGTKVEIY

SEQ ID NO: 8141 - protein, 107 aa, Homo sapiens; identical to SEQ ID NO: 8136
  Light chain

SEQ ID NO: 8142 - protein, 107 aa, Homo sapiens; identical to SEQ ID NO: 8137
  Light chain

SEQ ID NO: 8143 - protein, 107 aa, Homo sapiens; identical to SEQ ID NO: 8140
  Light chain

SEQ ID NO: 8144 - protein, 107 aa, Homo sapiens
  Light chain
AIQMTQSPSSLSASVGDRVTITCRASQGIRNDLGWYQQKPGKAPKLLIYAASSLQSGVPSRFSGSGSGTDFTLTISSLQPEDFATYYCPQDYNYPRTFGQGTKVEIK

SEQ ID NO: 8145 - protein, 107 aa, Homo sapiens; identical to SEQ ID NO: 8136
  Light chain

SEQ ID NO: 8146 - protein, 107 aa, Homo sapiens; identical to SEQ ID NO: 8136
  Light chain

SEQ ID NO: 8147 - protein, 107 aa, Homo sapiens; identical to SEQ ID NO: 8136
  Light chain

SEQ ID NO: 8148 - protein, 107 aa, Homo sapiens
  Light chain
DIQLTQSPSSLSASVGDRVTITCRASQGIRNDLGWYQQKPGKAPKLLIYAASTLQSGVPSRFSGSGSGTEFTLTISSLQPEDFAAYYCQQLNSYPRTFGQGTKVEIK

SEQ ID NO: 8149 - protein, 107 aa, Homo sapiens; identical to SEQ ID NO: 8136
  Light chain

SEQ ID NO: 8150 - protein, 107 aa, Homo sapiens; identical to SEQ ID NO: 8136
  Light chain

SEQ ID NO: 8151 - protein, 107 aa, Homo sapiens; identical to SEQ ID NO: 8140
  Light chain

SEQ ID NO: 8152 - protein, 107 aa, Homo sapiens; identical to SEQ ID NO: 8137
  Light chain

SEQ ID NO: 8153 - protein, 107 aa, Homo sapiens; identical to SEQ ID NO: 8137
  Light chain

SEQ ID NO: 8154 - protein, 107 aa, Homo sapiens; identical to SEQ ID NO: 8137
  Light chain

SEQ ID NO: 8155 - protein, 107 aa, Homo sapiens; identical to SEQ ID NO: 8136
  Light chain

SEQ ID NO: 8156 - protein, 107 aa, Homo sapiens; identical to SEQ ID NO: 8137
  Light chain

SEQ ID NO: 8157 - protein, 107 aa, Homo sapiens; identical to SEQ ID NO: 8137
  Light chain

SEQ ID NO: 8158 - protein, 107 aa, Homo sapiens; identical to SEQ ID NO: 8136
  Light chain

SEQ ID NO: 8159 - protein, 107 aa, Homo sapiens; identical to SEQ ID NO: 8136
  Light chain

SEQ ID NO: 8160 - protein, 107 aa, Homo sapiens
  Light chain
DIQMTQSPSSLSASVGDRVTITCRASQDIRNDLGWYQQKPGKAPERLIYAASSLQSGVPSRFSGSGSGTEFTLTISSLQPEDFATYYCLQHNSYPLTFGQGTKVEIY

SEQ ID NO: 8161 - protein, 107 aa, Homo sapiens; identical to SEQ ID NO: 8138
  Light chain

SEQ ID NO: 8162 - protein, 107 aa, Homo sapiens; identical to SEQ ID NO: 8138
  Light chain

SEQ ID NO: 8163 - protein, 107 aa, Homo sapiens; identical to SEQ ID NO: 8136
  Light chain

SEQ ID NO: 8164 - protein, 107 aa, Homo sapiens; identical to SEQ ID NO: 8138
  Light chain

SEQ ID NO: 8165 - protein, 107 aa, Homo sapiens; identical to SEQ ID NO: 17
  Light chain

SEQ ID NO: 8166 - protein, 107 aa, Homo sapiens; identical to SEQ ID NO: 18
  Light chain

SEQ ID NO: 8167 - protein, 107 aa, Homo sapiens; identical to SEQ ID NO: 19
  Light chain

SEQ ID NO: 8168 - protein, 107 aa, Homo sapiens; identical to SEQ ID NO: 20
  Light chain

SEQ ID NO: 8169 - protein, 107 aa, Homo sapiens; identical to SEQ ID NO: 8011
  Light chain

SEQ ID NO: 8170 - protein, 107 aa, Homo sapiens; identical to SEQ ID NO: 21
  Light chain

SEQ ID NO: 8171 - protein, 107 aa, Homo sapiens
  Light chain
DIQMTQSPSSLSASVGDRVTITCRASQGIRNDLGWYQQKPGKAPKRLIYAVSSLQSGVPSRFSGSGSGTEFTLTISSLQPEDFATYYCLQYNSFPFTFGPGTKVDIK

SEQ ID NO: 8172 - protein, 107 aa, Homo sapiens
  Light chain
DIQMTQSPSSLSASVGDRVTITCRASQGIRNDLGWYQQKPGKAPKRLIYAASSLQSGVPSRFSGSGSGTEFTLTISSLQPEDFATYYCLQYNSYPLTFGPGTKVDIK

SEQ ID NO: 8173 - protein, 107 aa, Homo sapiens
  Light chain
DIQMTQSPSSLSASVGDRVTITCRASQGIRNDLGWYQQKPGKAPKRLIYAASSLQSGVPSRFSGSGSGTEFTLTISSLQPEDFATYYCLQYNSYPFTFGPGTKVDIK

SEQ ID NO: 8174 - protein, 107 aa, Homo sapiens
  Light chain
DIQMTQSPSSLSASVGDRVTITCRASQGIRNDLGWYQQKPGKAPKRLVYAASSLQSGVPSRFSGSGSGTEFTLTISSLQPEDFATYYCLQHNSFPFTFGPGTKVDIK

SEQ ID NO: 8175 - protein, 107 aa, Homo sapiens; identical to SEQ ID NO: 18
  Light chain

SEQ ID NO: 8176 - protein, 107 aa, Homo sapiens
  Light chain
DIQMTQSPSSLSASVGDRVTITCRASQGIRNDLGWYQQKPGKAPKRLIYAASSLQSGVPSRFSGSGSGTEFTLTISSLQPEDFATYYCLQYNNYPFTFGPGTKVDIK

SEQ ID NO: 8177 - protein, 107 aa, Homo sapiens; identical to SEQ ID NO: 18
  Light chain

SEQ ID NO: 8178 - protein, 107 aa, Homo sapiens; identical to SEQ ID NO: 8160
  Light chain

SEQ ID NO: 8179 - protein, 107 aa, Homo sapiens; identical to SEQ ID NO: 22
  Light chain

SEQ ID NO: 8180 - protein, 107 aa, Homo sapiens; identical to SEQ ID NO: 21
  Light chain

SEQ ID NO: 8181 - protein, 107 aa, Homo sapiens; identical to SEQ ID NO: 23
  Light chain

SEQ ID NO: 8182 - protein, 107 aa, Homo sapiens; identical to SEQ ID NO: 8011
  Light chain

SEQ ID NO: 8183 - protein, 107 aa, Homo sapiens; identical to SEQ ID NO: 22
  Light chain

SEQ ID NO: 8184 - protein, 107 aa, Homo sapiens
  Light chain
DIQMTQSPSSLSASVGDRVTITCRASQGISDYLAWYQQKPGKVPKVLIYAASTLQSGVPSRFSGSGSGTDFTLTISSLQPEDVATYFCQKYNSAPFTFGPGTKVDIK

SEQ ID NO: 8185 - protein, 107 aa, Homo sapiens; identical to SEQ ID NO: 22
  Light chain

SEQ ID NO: 8186 - protein, 107 aa, Homo sapiens
  Light chain
DIQMTQSPSSLSASVGDRVTITCRASQGIRNDLGWYQQKPGKAPKRLIYAASSLQSGVPSRFSGSGSGTEFTLTISSLQPEDFATYYCLQYTNYPWTFGQGTKVEIK

SEQ ID NO: 8187 - protein, 107 aa, Homo sapiens
  Light chain
AIQMTQSPSSLSASVGDRVTITCRASQGIRNDLGWYQQKPGKAPKLLIYAASSLQSGVPSRFSGSGSGTDFTLTISSLQPEDFATYYCLQDYNYPITFGQGTRLEIK

SEQ ID NO: 8188 - protein, 107 aa, Homo sapiens; identical to SEQ ID NO: 18
  Light chain

SEQ ID NO: 8189 - protein, 107 aa, Homo sapiens; identical to SEQ ID NO: 8173
  Light chain

SEQ ID NO: 8190 - protein, 107 aa, Homo sapiens
  Light chain
DIQMTQSPSSLSASVGDRVTITCRASQGIRNDLGWYQQKPGKAPKRLIYAASSLQSGVPSRFSGSGSGTEFTLTISSLQPEDFATYYCLQYKSYPYTFGQGTKLEIK

SEQ ID NO: 8191 - protein, 107 aa, Homo sapiens; identical to SEQ ID NO: 18
  Light chain

SEQ ID NO: 8192 - protein, 107 aa, Homo sapiens; identical to SEQ ID NO: 22
  Light chain

SEQ ID NO: 8193 - protein, 107 aa, Homo sapiens
  Light chain
DIQMTQSPSSLSASVGDRVTITCRASQGIRNDLGWYQQKPGKAPKRLIYAASSLQSGVPSRFSGSGSGTEFTLTISSLQPEDFATYYCLQYISYPFTFGPGTKVDIK

SEQ ID NO: 8194 - protein, 107 aa, Homo sapiens
  Light chain
DIQLTQSPSSLSASVGDRVTITCRASQDIRNDLGWYQQKPGKAPERLIYAASSLQSGVPSRFSGSGSGTEFTLTISSLQPEDFATYYCQQLNSYPRTFGQGTKVEIK

SEQ ID NO: 8195 - protein, 107 aa, Homo sapiens
  Light chain
DIQMTQSPSSLSASVGDRVTITCRASQDIRNDLGWYQQKPGKAPKRLIYAASSLQSGVPSRFSGSGSGTEFTLTISSLQSEDFATYYCLQHNSYPPTFGQGTKVEIK

SEQ ID NO: 8196 - protein, 107 aa, Homo sapiens; identical to SEQ ID NO: 17
  Light chain

SEQ ID NO: 8197 - protein, 107 aa, Homo sapiens; identical to SEQ ID NO: 19
  Light chain

SEQ ID NO: 8198 - protein, 107 aa, Homo sapiens; identical to SEQ ID NO: 8011
  Light chain

SEQ ID NO: 8199 - protein, 107 aa, Homo sapiens; identical to SEQ ID NO: 18
  Light chain

SEQ ID NO: 8200 - protein, 107 aa, Homo sapiens
  Light chain
DIQLTQSPSFLSASVGDRVTITCRASQDISNYLAWYQQKPGKAPKLLIYAASTLQSGVPSRFSGSGSGTEFTLTISGLQPEDFATYYCHQLNSYPLTFGGGTKVEIK

SEQ ID NO: 8201 - protein, 107 aa, Homo sapiens; identical to SEQ ID NO: 8011
  Light chain

SEQ ID NO: 8202 - protein, 107 aa, Homo sapiens; identical to SEQ ID NO: 19
  Light chain

SEQ ID NO: 8203 - protein, 107 aa, Homo sapiens
  Light chain
DIQMTQSPSSLSASVGDRVTITCRASQGIRNDLGWYQQKPGKAPKRLIYVASNLQSGVPSRFSGSGSGTEFTLTISSLQPEDFATYYCLQHTSYPWTFGQGTKVEIK

SEQ ID NO: 8204 - protein, 107 aa, Homo sapiens; identical to SEQ ID NO: 8160
  Light chain

SEQ ID NO: 8205 - protein, 107 aa, Homo sapiens; identical to SEQ ID NO: 17
  Light chain

SEQ ID NO: 8206 - protein, 107 aa, Homo sapiens; identical to SEQ ID NO: 18
  Light chain

SEQ ID NO: 8207 - protein, 107 aa, Homo sapiens
  Light chain
DIQLTQSPSFLSASVGDRVTITCRASQGISSYLAWYQQKPGKAPKLLIYAASTLHSGVPSRFSGSGSGTEFTLTISSLQPEDFATYYCQQLNFYPPTFGQGTKVEIK

SEQ ID NO: 8208 - protein, 107 aa, Homo sapiens; identical to SEQ ID NO: 19
  Light chain

SEQ ID NO: 8209 - protein, 107 aa, Homo sapiens; identical to SEQ ID NO: 20
  Light chain

SEQ ID NO: 8210 - protein, 107 aa, Homo sapiens; identical to SEQ ID NO: 18
  Light chain

SEQ ID NO: 8211 - protein, 107 aa, Homo sapiens
  Light chain
AIQMTQSPSSLSASVGDILTITCRASQGIRNDLGWYQQKPGKAPKLLIYAASSLQSGVPSRFSGSGSGTDFTLTISSLQPEDFATYYCLQDHNYPWTSGQGTKVEIK

SEQ ID NO: 8212 - protein, 107 aa, Homo sapiens; identical to SEQ ID NO: 22
  Light chain

SEQ ID NO: 8213 - protein, 107 aa, Homo sapiens; identical to SEQ ID NO: 8160
  Light chain

SEQ ID NO: 8214 - protein, 107 aa, Homo sapiens; identical to SEQ ID NO: 8200
  Light chain

SEQ ID NO: 8215 - protein, 107 aa, Homo sapiens; identical to SEQ ID NO: 17
  Light chain

SEQ ID NO: 8216 - protein, 107 aa, Homo sapiens; identical to SEQ ID NO: 8044
  Light chain

SEQ ID NO: 8217 - protein, 107 aa, Homo sapiens; identical to SEQ ID NO: 15
  Light chain

SEQ ID NO: 8218 - protein, 107 aa, Homo sapiens
  Light chain
DIQMTQSPSSLSVSVGDRVTITCRASQGISNYLAWYQQKPGKVPKVLIYAASTLQSGVPSRFSGSGSGTDFTLTISSLQPEDVATYYCQKYNSAPFTFGPGTKVDIK

SEQ ID NO: 8219 - protein, 107 aa, Homo sapiens
  Light chain
AIQMTQSPSSLSASVGDRVTITCRASQGIRNDLGWYQQKPGKAPKLLIYAASSLQSGVPSRFSGRGSGTDFTLTISSLQPEDFATYYCLQDFIYPWTFGQGTKVEIK

SEQ ID NO: 8220 - protein, 107 aa, Homo sapiens
  Light chain
DIQMTQSPSSLSASVGDRVTITCRASQGIRNDLGWYQQKPGKAPKRLIYAASSLQSGVPSRFSGSGSGTEFTLTISSLQPEDFATYYCLQHNSFPFTFGPGTKVDIK

SEQ ID NO: 8221 - protein, 107 aa, Homo sapiens; identical to SEQ ID NO: 16
  Light chain

SEQ ID NO: 8222 - protein, 107 aa, Homo sapiens
  Light chain
DIQMTQSPSSLSASVGDRVTITCRASQGIRNDLGWYQQKPGKAPKRLIYAASSLQSGVPSRFSGSGSGTEFTLTISSLQPEDFATYYCLQYNSFPFTFGPGTKVDIK

SEQ ID NO: 8223 - protein, 107 aa, Homo sapiens
  Light chain
DIQMTQSPSSLSASVGDRVTITCRAGQGIRNDLGWYQQKPGKAPKRLIYAASNLQSGVPSRFSGSGSGTEFTLTISRLQPEDFATYYCLQHNSYPWTFGQGTKVEIR

SEQ ID NO: 8224 - protein, 107 aa, Homo sapiens
  Light chain
DIQMTQSPSSLSASVGDRVTITCRASQGIRNDLGWYQQKPGKAPKRLIYAASSLQSGVPSRFSGSGSGTEFTLTISSLQPEDFATYYCLQYINYPWTFGQGTKVEIK

SEQ ID NO: 8225 - protein, 107 aa, Homo sapiens
  Light chain
EIVMTQSPVTLSVSPGERATLSCRASQSVSSNLAWYQQKPGQAPRLLIYGASTRATGIPARFSGSGSGTEFTLTISSLQSEDFAIYYCQQHNNWPFTFGPGTKVDIK

SEQ ID NO: 8226 - protein, 107 aa, Homo sapiens; identical to SEQ ID NO: 8218
  Light chain

SEQ ID NO: 8227 - protein, 107 aa, Homo sapiens
  Light chain
AIQMTQSPSSLSASVGDRVTITCRASQGIRNDLGWYQQKPGKAPKLLIYAASSLQSGVPSRFSGSGSGTDFTLTISSLQPEDFATYYCLQDYNYPYTFGQGTKLEIK

SEQ ID NO: 8228 - protein, 107 aa, Homo sapiens
  Light chain
DIQMTQSPSSLSASVGDRVTITCRASQGIRNDLGWYQQKPGKAPKRLIYAASSLQSGVPSRFSGSGSGTEFTLTISSLQPEDFATYYCLQYNSYPWTFGQGTKVEIK

SEQ ID NO: 8229 - protein, 107 aa, Homo sapiens; identical to SEQ ID NO: 8218
  Light chain

SEQ ID NO: 8230 - protein, 107 aa, Homo sapiens; identical to SEQ ID NO: 8220
  Light chain

SEQ ID NO: 8231 - protein, 107 aa, Homo sapiens; identical to SEQ ID NO: 8044
  Light chain

SEQ ID NO: 8232 - protein, 107 aa, Homo sapiens
  Light chain
DIQMTQSPSSLSASVGDRVTITCRASQGIRNDLGWYQQKPGKAPKRLIYAASSLQSGVPSRFSGSGSGTEFTLTISSLQPEDFATYYCLQHNSLPFTFGPGTKVDIK

SEQ ID NO: 8233 - protein, 107 aa, Homo sapiens
  Light chain
DIQMTQSPSSLSASVGDRVTITCRASQSISSYLNWYQQKPGKAPKLLIYAASSLQSGVPSRFSGSGSGTDFTLTISSLQPEDFATYYCQQSYSTPWTFGQGTKVEIK

SEQ ID NO: 8234 - protein, 107 aa, Homo sapiens; identical to SEQ ID NO: 8044
  Light chain

SEQ ID NO: 8235 - protein, 107 aa, Homo sapiens
  Light chain
DIQMTQSPSSLSASVGDRVTITCRASQGIRNDLGWYQQKPGKAPKRLIYAASSLQSGVPSRFSGSGSGTEFTLTISSLQPEDFATYYCLQHNSYLLTFGGGTKVEIK

SEQ ID NO: 8236 - protein, 107 aa, Homo sapiens; identical to SEQ ID NO: 15
  Light chain

SEQ ID NO: 8237 - protein, 108 aa, Homo sapiens
  Light chain
EIVLTQSPATLSLSPGERATLSCGASQSVSSSYLAWYQQKPGLAPRLLIYDASSRATGIPDRFSGSGSGTDFTLTISRLEPEDFAVYYCQQYGSSPYTFGQGTKLEIK

SEQ ID NO: 8238 - protein, 107 aa, Homo sapiens; identical to SEQ ID NO: 8220
  Light chain

SEQ ID NO: 8239 - protein, 107 aa, Homo sapiens; identical to SEQ ID NO: 8219
  Light chain

SEQ ID NO: 8240 - protein, 107 aa, Homo sapiens; identical to SEQ ID NO: 8044
  Light chain

SEQ ID NO: 8241 - protein, 108 aa, Homo sapiens
  Light chain
EIVLTQSPGTLSLSPGERATLSCRASQSVSSSYLAWYQQKPGQAPRLLIYGASSRATGIPDRFSGSGSGTDFTLTISRLEPEDFAVYYCQQYGSSPFTFGPGTKVDIK

SEQ ID NO: 8242 - protein, 108 aa, Homo sapiens
  Light chain
EIVMTQSPATLSLSPGERATLSCRASQSVSSSYLSWYQQKPGQAPRLLIYGASTRATGIPARFSGSGSGTDFTLTISSLQPEDFAVYYCQQDYNLPFTFGPGTKVDIK

SEQ ID NO: 8243 - protein, 108 aa, Homo sapiens
  Light chain
EIVLTQSPGTLSLSPGERATLSCRASQSVSSSYLAWYQQKPGQAPRLLIYGASSRATGIPDRFSGSGSGTDFTLTISRLEPEDFAVYYCQQYGSSPWTFGQGTKVEIK

SEQ ID NO: 8244 - protein, 107 aa, Homo sapiens; identical to SEQ ID NO: 8102
  Light chain

SEQ ID NO: 8245 - protein, 107 aa, Homo sapiens
  Light chain
AIQMTQSPSSLSASVGDRVTITCRASQGIRNDLGWYQQKPGKAPKLLIYAASSLQSGVPSRFSGSGSGTDFTLTISSLQPEDFATYYCLQDYNYPWTFGQGTKVEIK

SEQ ID NO: 8246 - protein, 107 aa, Homo sapiens; identical to SEQ ID NO: 8218
  Light chain

SEQ ID NO: 8247 - protein, 107 aa, Homo sapiens; identical to SEQ ID NO: 16
  Light chain

SEQ ID NO: 8248 - protein, 107 aa, Homo sapiens
  Light chain
DIQMTQSPSSLSASVGDRVTITCRASKGIRNDLGWYQQKPGKAPKRLIYVASNLQSGVPSRFSGSGSGTEFTLTISSLQPEDFATYYCLQHTSYPWTFGQGTKVEIK

SEQ ID NO: 8249 - protein, 107 aa, Homo sapiens; identical to SEQ ID NO: 8219
  Light chain

SEQ ID NO: 8250 - protein, 107 aa, Homo sapiens; identical to SEQ ID NO: 15
  Light chain

SEQ ID NO: 8251 - protein, 107 aa, Homo sapiens
  Light chain
EIVMTQSPATLSLSPGERATLSCRTSQSISSSYLSWYQQKPGQAPRLLIYDASTRATGIPARFSGSGSGTDFTLTVSSLQPEDFAVYYCQQDYNLPTFGQGTKLEIK

SEQ ID NO: 8252 - protein, 107 aa, Homo sapiens; identical to SEQ ID NO: 8219
  Light chain

SEQ ID NO: 8253 - protein, 107 aa, Homo sapiens; identical to SEQ ID NO: 8222
  Light chain

SEQ ID NO: 8254 - protein, 107 aa, Homo sapiens; identical to SEQ ID NO: 15
  Light chain

SEQ ID NO: 8255 - protein, 107 aa, Homo sapiens; identical to SEQ ID NO: 8064
  Light chain

SEQ ID NO: 8256 - protein, 107 aa, Homo sapiens
  Light chain
EIVMTQSPATLSVSPGERATLSCRASQSVSSNLAWYQQKPGQAPRLLIYGSSTRATGIPARFSGSGSGTEFTLTISSLQSEDFAVYYCQQYNNWPYTFGQGTKLEIK

SEQ ID NO: 8257 - protein, 107 aa, Homo sapiens; identical to SEQ ID NO: 12
  Light chain

SEQ ID NO: 8258 - protein, 107 aa, Homo sapiens; identical to SEQ ID NO: 14
  Light chain

SEQ ID NO: 8259 - protein, 107 aa, Homo sapiens
  Light chain
DIQMTQSPSSLSASVGDRVTITCRASQGISSWLAWYQQKPDKAPKSLIYAASSLQSGVPSRFSGSGSGTDFTLTISSLQPEDFATYYCQQFNSYPYTFGQGTKLEIK

SEQ ID NO: 8260 - protein, 107 aa, Homo sapiens; identical to SEQ ID NO: 13
  Light chain

SEQ ID NO: 8261 - protein, 107 aa, Homo sapiens; identical to SEQ ID NO: 14
  Light chain

SEQ ID NO: 8262 - protein, 107 aa, Homo sapiens; identical to SEQ ID NO: 14
  Light chain

SEQ ID NO: 8263 - protein, 107 aa, Homo sapiens; identical to SEQ ID NO: 8256
  Light chain

SEQ ID NO: 8264 - protein, 107 aa, Homo sapiens
  Light chain
EIVLTQSPSFLSASVGDRVTITCRASQSIGSSLHWYQQKPDQSPKLLIKYASQSFSGVPSRFSGSGSGTDFTLTINSLQAEDAATYYCHQSSSLPQTFGQGTKVEIK

SEQ ID NO: 8265 - protein, 107 aa, Homo sapiens; identical to SEQ ID NO: 8264
  Light chain

SEQ ID NO: 8266 - protein, 107 aa, Homo sapiens; identical to SEQ ID NO: 8256
  Light chain

SEQ ID NO: 8267 - protein, 107 aa, Homo sapiens; identical to SEQ ID NO: 8256
  Light chain

SEQ ID NO: 8268 - protein, 107 aa, Homo sapiens; identical to SEQ ID NO: 8256
  Light chain

SEQ ID NO: 8269 - protein, 107 aa, Homo sapiens; identical to SEQ ID NO: 8256
  Light chain

SEQ ID NO: 8270 - protein, 107 aa, Homo sapiens
  Light chain
DIQMTQSPSSLSASVGDRVTITCRASQGISSWLAWYQQKPEKAPKSLIYAASSLQSGVPSRFSGSGSGTDFTLTISSLQPEDFATYYCQQFNNYPYTFGQGTKLEIK

SEQ ID NO: 8271 - protein, 107 aa, Homo sapiens; identical to SEQ ID NO: 13
  Light chain

SEQ ID NO: 8272 - protein, 107 aa, Homo sapiens; identical to SEQ ID NO: 8256
  Light chain

SEQ ID NO: 8273 - protein, 107 aa, Homo sapiens; identical to SEQ ID NO: 8256
  Light chain

SEQ ID NO: 8274 - protein, 107 aa, Homo sapiens; identical to SEQ ID NO: 8256
  Light chain

SEQ ID NO: 8275 - protein, 107 aa, Homo sapiens; identical to SEQ ID NO: 8256
  Light chain

SEQ ID NO: 8276 - protein, 107 aa, Homo sapiens; identical to SEQ ID NO: 8256
  Light chain

SEQ ID NO: 8277 - protein, 107 aa, Homo sapiens; identical to SEQ ID NO: 8256
  Light chain

SEQ ID NO: 8278 - protein, 107 aa, Homo sapiens; identical to SEQ ID NO: 8256
  Light chain

SEQ ID NO: 8279 - protein, 107 aa, Homo sapiens; identical to SEQ ID NO: 8256
  Light chain

SEQ ID NO: 8280 - protein, 107 aa, Homo sapiens; identical to SEQ ID NO: 8256
  Light chain

SEQ ID NO: 8281 - protein, 113 aa, Homo sapiens
  Light chain
DVVMTQSPLSLPVTLGQPASISCRSSQSLVYSDGNTYLNWFQQRPGQPPRRLIYKVSNRDSGVPDRFSGSGSGTDFTLKISRVEAEDVGVYYCMQGTHWPPYTFGQGTKLEIK

SEQ ID NO: 8282 - protein, 107 aa, Homo sapiens; identical to SEQ ID NO: 8256
  Light chain

SEQ ID NO: 8283 - protein, 107 aa, Homo sapiens; identical to SEQ ID NO: 14
  Light chain

SEQ ID NO: 8284 - protein, 107 aa, Homo sapiens; identical to SEQ ID NO: 8256
  Light chain

SEQ ID NO: 8285 - protein, 107 aa, Homo sapiens; identical to SEQ ID NO: 13
  Light chain

SEQ ID NO: 8286 - protein, 107 aa, Homo sapiens
  Light chain
DIQMTQSPSSLSASVGDRVTITCRASQGIRNDLGWYQQKPGKAPKRLIYAASSLQSGVPSRFSGSGSGTEFTLTISSLQPEDFATYYCLQYNSYPLTFGGGTKVEIK

SEQ ID NO: 8287 - protein, 107 aa, Homo sapiens
  Light chain
EIVMTQSPATLSVSPGERATLSCRASQSVSSNLAWYQQKPGQAPRLLVYGASTRATGIPARFSGSGSGTEFTLTISSLQSEDFAVYYCQQYNNWPYTFGQGTKLEIK

SEQ ID NO: 8288 - protein, 106 aa, Homo sapiens
  Light chain
AIQLTQSPSSLSASVGDRVTFTCRASQGISSALAWYQQKPGRSPKLLIYDASSLESGVPSRFSGSGSETVFTLTISSLQPEDFATYYCQQFNNYPTFGQGTKLEIK

SEQ ID NO: 8289 - protein, 107 aa, Homo sapiens; identical to SEQ ID NO: 8044
  Light chain

SEQ ID NO: 8290 - protein, 107 aa, Homo sapiens
  Light chain
AIQLTQSPSSLSESVGDRVTITCRASQGIRNDLGWYQQKPGKAPKRLIYAASSLQSGVPSRFSGSGSGTDFTLTISSLQPEDFATYYCQQFNNYPYTFGQGTKLEIK

SEQ ID NO: 8291 - protein, 107 aa, Homo sapiens
  Light chain
DIQLTQSPSSLSASVGDRVTITCRASQGISSYLAWYQQKPGKAPKLLIYAASTLQSGVPSRFSGSGSGTEFTLTISSLQPEDFATYYCQQLNSYPRTFGQGTKVEIK

SEQ ID NO: 8292 - protein, 107 aa, Homo sapiens; identical to SEQ ID NO: 8287
  Light chain

SEQ ID NO: 8293 - protein, 107 aa, Homo sapiens; identical to SEQ ID NO: 8290
  Light chain

SEQ ID NO: 8294 - protein, 106 aa, Homo sapiens; identical to SEQ ID NO: 8288
  Light chain

SEQ ID NO: 8295 - protein, 107 aa, Homo sapiens
  Light chain
DIQLTQSPSSLSASVGDRVTIACRASQGIRNDLGWYQQKPGKAPKRLIYAASSLQSGVPSRFSGSGSGTEFTLTISSLQPEDFATYYCQQLNSYPITFGQGTRLEIK

SEQ ID NO: 8296 - protein, 107 aa, Homo sapiens; identical to SEQ ID NO: 8295
  Light chain

SEQ ID NO: 8297 - protein, 107 aa, Homo sapiens
  Light chain
DIQMTQSPSSLSASVGDRVTITCRASQGIRNDLGWYQQKPGKAPKRLIYAASSLQSGVPSRFSGSGSGTEFTLTISSLQPEDFATYYCLQHNTYPRTFGQGTKVEIK

SEQ ID NO: 8298 - protein, 107 aa, Homo sapiens
  Light chain
EIVLTQSPDFQSVTPKEKVTITCRASQSIGSSLHWYQQKPDQSPKLLIKYASQSFSGVPSRFSGSGSGTDFTLTINSLEAEDAATYYCHQSSSLPHTFGQGTKLEIK

SEQ ID NO: 8299 - protein, 107 aa, Homo sapiens
  Light chain
EIVLTQSPGTLSLSPGERATLSCRASQSVSSSYLAWYQQKPGQAPRLLIYGASSRATGIPDRFSGSGSGTDFTLTISRLEPEDFAVYYCQQYGSSLTFGGGTKVEIK

SEQ ID NO: 8300 - protein, 107 aa, Homo sapiens
  Light chain
DIQMTQSPSSLSASVGDRVTITCRASQGISSALAWYQQKPGKAPKRLIYAASSLQSGVPSRFSGSGSGTEFTLTISSLQPEDFATYYCLQHNSYPYTFGQGTKLEIK

SEQ ID NO: 8301 - protein, 107 aa, Homo sapiens; identical to SEQ ID NO: 8295
  Light chain

SEQ ID NO: 8302 - protein, 107 aa, Homo sapiens; identical to SEQ ID NO: 8295
  Light chain

SEQ ID NO: 8303 - protein, 107 aa, Homo sapiens
  Light chain
EIVLTQSPATLSLSPGERVTLSCRASQSVSSYLAWYQQKPGQAPRLLIYDASNRATGIPARFSGSGSGTDFTLTISSLEPEDFAVYYCQQRSNWPFTFGPGTKVDIK

SEQ ID NO: 8304 - protein, 107 aa, Homo sapiens; identical to SEQ ID NO: 8300
  Light chain

SEQ ID NO: 8305 - protein, 107 aa, Homo sapiens
  Light chain
AIQLTQSPSSLSASVGDRVTITCRASQGISSALAWYQQKPGKAPKVLIYDASSLESGVPSRFSGSGSGTDFTLTISSLQPEDFATYYCQQFNNYPCTFGQGTKLEIK

SEQ ID NO: 8306 - protein, 107 aa, Homo sapiens; identical to SEQ ID NO: 8295
  Light chain

SEQ ID NO: 8307 - protein, 105 aa, Homo sapiens
  Light chain
AIQLTQSPSSLSASVGDRVTITCRASQGISSALAWYQQKPGKAPKLLIYDASSLESGVPSRFSGSGSGTEFTLTISSLQPEDFATYYCQQLNSYTFSQGTKLEIK

SEQ ID NO: 8308 - protein, 107 aa, Homo sapiens; identical to SEQ ID NO: 8298
  Light chain

SEQ ID NO: 8309 - protein, 107 aa, Homo sapiens; identical to SEQ ID NO: 8295
  Light chain

SEQ ID NO: 8310 - protein, 107 aa, Homo sapiens; identical to SEQ ID NO: 8287
  Light chain

SEQ ID NO: 8311 - protein, 107 aa, Homo sapiens; identical to SEQ ID NO: 8286
  Light chain

SEQ ID NO: 8312 - protein, 107 aa, Homo sapiens
  Light chain
DIQLTQSPSFLSASVGDRVTITCRASQGISSYLAWYQQKPGKAPKLLIYAASTLQSGVPSRFSGSGSGTEFTLTISSLQPEDFATYYCQQLNSYPWTFGQGTKVEIK

SEQ ID NO: 8313 - protein, 107 aa, Homo sapiens; identical to SEQ ID NO: 14
  Light chain

SEQ ID NO: 8314 - protein, 107 aa, Homo sapiens; identical to SEQ ID NO: 14
  Light chain

SEQ ID NO: 8315 - protein, 107 aa, Homo sapiens
  Light chain
DIQMTQSPSSLSASVGDRVTITCRASQAIRNDLGWFQQKPGKAPKRLIYAASSLQSGVPLRFSGSGSGTEFTLTISSLQPEDFATYYCLQHNSFPWTFGQGTKVEIK

SEQ ID NO: 8316 - protein, 107 aa, Homo sapiens; identical to SEQ ID NO: 8286
  Light chain

SEQ ID NO: 8317 - protein, 107 aa, Homo sapiens; identical to SEQ ID NO: 8286
  Light chain

SEQ ID NO: 8318 - protein, 107 aa, Homo sapiens; identical to SEQ ID NO: 14
  Light chain

SEQ ID NO: 8319 - protein, 107 aa, Homo sapiens; identical to SEQ ID NO: 14
  Light chain

SEQ ID NO: 8320 - protein, 107 aa, Homo sapiens; identical to SEQ ID NO: 8286
  Light chain

SEQ ID NO: 8321 - protein, 107 aa, Homo sapiens
  Light chain
EIVLTQSPATLSLSPGERATLSCRASQSVSSYLAWYQQKPGQAPRLLIYDASNRATGIPARFSGSGSGTDFTLTISSLEPEDFAVYYCHQRNTWPYTFGQGTKLEIK

SEQ ID NO: 8322 - protein, 107 aa, Homo sapiens
  Light chain
EIVLTQSPDFQSVTPKEKVTITCRASQSIGGSLHWYQQKPDQSPKLLIKYASQSISGVPSRFSGSGSGTDLTLTINSLEAEDAAAYYCHQSRTLPHTFGQGTKLEIK

SEQ ID NO: 8323 - protein, 107 aa, Homo sapiens
  Light chain
EIVLTQSPDFQSVTPKEKVTITCRASQSIGSSLHWYQQKPDQSPKLLIKYASQSFSGVPSRFSGSGSGTDFTLTINSLEAEDAATYYCHQSSGLPHTFGQGTKLEIK

SEQ ID NO: 8324 - protein, 107 aa, Homo sapiens
  Light chain
EIVLTQSPDFQSVTPREKVTITCRASQSIGSSLHWYQQKPDQSPNLLIKYASQSFSGVPSRFSGSGSGTDFTLTINSLEAEDAATYYCHQSSILPLTFGGGTKVEIK

SEQ ID NO: 8325 - protein, 107 aa, Homo sapiens
  Light chain
EIVLTQSPDFQSVTPKEKVTITCRASQSIGSSLHWYQQKPGQSPKLLIKYASQPFSGVPSRFSGSGSGTDFTLTINGLEAEDAATYNCHQSSRLPLTFGGGTKVEIK

SEQ ID NO: 8326 - protein, 107 aa, Homo sapiens
  Light chain
EIVLTQSPDFQSVTPKEKVTITCRASQSIGSSLHWYQQKPDQSPKLLIKYASQSISGVPSRFSGSGSGTDFTLTINSLEAEDAAAYYCHQSSSLPCTFGQGTKLEIK

SEQ ID NO: 8327 - protein, 107 aa, Homo sapiens; identical to SEQ ID NO: 8298
  Light chain

SEQ ID NO: 8328 - protein, 107 aa, Homo sapiens; identical to SEQ ID NO: 8298
  Light chain

SEQ ID NO: 8329 - protein, 106 aa, Homo sapiens
  Light chain
EIVLTQSPDFQSVTPKEKVTITCRASQSIGSSLHWYQQKPDQSPKLLIKFASQSISGVPSRFSGSGSGTDFTLTINSLEAEDAAAYYCHQSSSLPTFGQGTKVEIK

SEQ ID NO: 8330 - protein, 106 aa, Homo sapiens; identical to SEQ ID NO: 8329
  Light chain

SEQ ID NO: 8331 - protein, 107 aa, Homo sapiens
  Light chain
EIVLTQSPDFQSVTPKEKVTITCRASQSIGSSLHWYQQKPGQSPKLLIKYASQPFSGVPSRFSGSGSGTDFTLTINSLEAEDAATYYCHQSSSLPWTFGQGTKVEIK

SEQ ID NO: 8332 - protein, 107 aa, Homo sapiens; identical to SEQ ID NO: 8331
  Light chain

SEQ ID NO: 8333 - protein, 107 aa, Homo sapiens; identical to SEQ ID NO: 8031
  Light chain

SEQ ID NO: 8334 - protein, 107 aa, Homo sapiens; identical to SEQ ID NO: 8031
  Light chain

SEQ ID NO: 8335 - protein, 107 aa, Homo sapiens; identical to SEQ ID NO: 8031
  Light chain

SEQ ID NO: 8336 - protein, 107 aa, Homo sapiens; identical to SEQ ID NO: 8031
  Light chain

SEQ ID NO: 8337 - protein, 107 aa, Homo sapiens; identical to SEQ ID NO: 8031
  Light chain

SEQ ID NO: 8338 - protein, 107 aa, Homo sapiens
  Light chain
DIQMTQSPSSLSASVGDRVTITCRASQGIISWLAWYQQKPEKAPKSLIYAASSLQSGVPSRFSGSGSGTDFTLTISSLQPEDFATYYCHQYNSYPYTFGQGTKLEIK

SEQ ID NO: 8339 - protein, 107 aa, Homo sapiens
  Light chain
DIQMTQSPSSLSASVGDRVTITCRASQGIRNDLGWYQQKPGKAPKRLIYVASSLQSGVPSRFSGSGSGTEFTLTISSLQPEDFATYYCIQHNSYPLTFGGGTKVEIK

SEQ ID NO: 8340 - protein, 107 aa, Homo sapiens
  Light chain
DIQMTQSPSSLSASVGDRVTITCRASQGISSWLAWYQQKPEKAPKSLIYAASSLQSGVPSRFSGSGSGTDFTLTISSLQPEDFATYYCKQYNSYPYTFGQGTKLEIK

SEQ ID NO: 8341 - protein, 107 aa, Homo sapiens
  Light chain
DIQMTQSPSSLSASVGDRVTITCRASQGIRNDLGWYQQKPGKAPKRLIYVASSLQSGVPSRFSGSGSGTEFTLTISSLQPEDFATYYCLHHNSYPLTFGGGTKVEIK

SEQ ID NO: 8342 - protein, 107 aa, Homo sapiens; identical to SEQ ID NO: 8341
  Light chain

SEQ ID NO: 8343 - protein, 107 aa, Homo sapiens
  Light chain
DIQMTQSPSSLSASVGDRVTITCRASQGIRNELGWYQQKPGKAPKRLIYAASSLQSGVPSRFSGSGSGTEFTLTISSLQPEDFATYYCLHHYIYPWTFGQGTKVEVK

SEQ ID NO: 8344 - protein, 107 aa, Homo sapiens
  Light chain
DIQMTQSPSSLSASVGDRVTITCRTSQGIRNDLGWYQQKPGKAPKRLIYAASSLQSGVPSRFSGSGSGTEFTLTISSLQPEDFATYYCLHYNSYPLTFGGGTKVEIK

SEQ ID NO: 8345 - protein, 107 aa, Homo sapiens
  Light chain
DIQMTQSPSSLSASVGDRVTITCRASQGIRNDLGWYQQKPGKAPKRLIYAASSLQSGVPSRFSGSGSGTEFTLTISCLQPEDFATYYCLLYNSYPLTFGGVTKVEIK

SEQ ID NO: 8346 - protein, 107 aa, Homo sapiens
  Light chain
DIQMTQSPSSLSASVGDRVTITCRASQGIRNELGWYQQKPGKAPKRLIYAASSLQSGVPSRFSGSGSGTEFTLTISSLQREDFATYVCLPHYIYPWTFGQGTKMEIK

SEQ ID NO: 8347 - protein, 107 aa, Homo sapiens; identical to SEQ ID NO: 9
  Light chain

SEQ ID NO: 8348 - protein, 107 aa, Homo sapiens
  Light chain
AIQMTQSPSSLSASVGDRVTITCRASQGIRNDLGWYQQKPGKAPKLLIYAASSLQSGVPSRFSGSGSGTDFTLTISSLQPEDFATYYCLQDYNYPFTFGPGTKVDIK

SEQ ID NO: 8349 - protein, 107 aa, Homo sapiens; identical to SEQ ID NO: 8067
  Light chain

SEQ ID NO: 8350 - protein, 107 aa, Homo sapiens
  Light chain
AIQMTQSPSSLSASVGDRVTITCQASQGIRNDLGWYQQKPGKAPKLLIYAASSLQSGVPSRFSGSGSGTDFTLTISSLQPEDFATYYCLQDYNYPWTFGQGTKVEIK

SEQ ID NO: 8351 - protein, 107 aa, Homo sapiens; identical to SEQ ID NO: 8350
  Light chain

SEQ ID NO: 8352 - protein, 107 aa, Homo sapiens
  Light chain
AIQMTQSPSSLSASVGDRVTITCRASQDIRSDLGWFQLKPGKAPQLLIYAASSLQSGVPSRFSGSGSGTDFTLTITSLQPEDFATYYCLQDYNYPWTFGQGTKVEIK

SEQ ID NO: 8353 - protein, 107 aa, Homo sapiens; identical to SEQ ID NO: 8227
  Light chain

SEQ ID NO: 8354 - protein, 107 aa, Homo sapiens
  Light chain
DIQMTQSPSSLSASVGDRVTITCRASQGIRNDLGWYQQKPGKAPKRLIYAASSLQSGVPSRFSGSGSGTEFTLTISSLQPEDFATYYCLQFNSYPLTFGGGTKVEIK

SEQ ID NO: 8355 - protein, 107 aa, Homo sapiens
  Light chain
DIQMTQSPSSLSASVGDRVTITCRASQGIRNDLGWYQQKPGKAPKRLIYVASSLQSGVPSRFSGSGSGTEFTLTISSLQPEDFATYYCLQHNIYPLTFGGGTKVEIK

SEQ ID NO: 8356 - protein, 107 aa, Homo sapiens
  Light chain
DIQMTQSPSSLSASVGDRVTITCRASQGIRNDLGWYQQKPGKAPKRLIYAASSLQSGVPSRFSGSGSGTEFTLTISRLQPEDFSTYYCLQHNRYPLTFGGGTKVEIK

SEQ ID NO: 8357 - protein, 107 aa, Homo sapiens; identical to SEQ ID NO: 8315
  Light chain

SEQ ID NO: 8358 - protein, 107 aa, Homo sapiens
  Light chain
DIQMTQSPSSLSASVGDRVTITCRASQGIRNDLGWYQQKPGKAPKRLIYVASSLQSGVPSRFSGSGSGTEFTLTISSLQPEDFATYYCLQHNSSPLTFGGGTKVEIK

SEQ ID NO: 8359 - protein, 107 aa, Homo sapiens
  Light chain
DIQMTQSPSSLSASVGDRVTITCRASQGIRNDLGWYQQKPGKAPKRLIYAASNLQSGVPSRFSGSGSGTEFTLTISSLQHEDFATYYCLQHNSYHLTSGGGNKVEIK

SEQ ID NO: 8360 - protein, 107 aa, Homo sapiens
  Light chain
DIQMTQSPSSLSASVGDRVTITCRASQGIRNDLGWYQQKPGKAPKRLIYVASSLQSGVPSRFSGSGSGTEFTLTISSLQPEDFATYYCLQHNSYLLTFGGGTKVEIK

SEQ ID NO: 8361 - protein, 107 aa, Homo sapiens; identical to SEQ ID NO: 8360
  Light chain

SEQ ID NO: 8362 - protein, 107 aa, Homo sapiens
  Light chain
DIQMTQSPSSLSASVGDRVTITCRASQGIRNDLGWYQQKPGKAPKRLIYVASSLQSGVPSRFSGSGSGTEFTLTISSLHPEDFATYYCLQHNSYPFTFGGGTKVEIK

SEQ ID NO: 8363 - protein, 107 aa, Homo sapiens
  Light chain
DIQMTQSPSSLSASVGDRVTITCRASQGIRNDLGWYQQKPGKAPKRLIYAASNLQSGVPSRFSGSGSGTEFTLTISSLQPEDFATYYCLQHNSYPITFGGGTKVEIK

SEQ ID NO: 8364 - protein, 107 aa, Homo sapiens
  Light chain
DIQMTQSPSSLSASVGDRVTITCRASQGIRNDLGWYQQKPGKAPKRLIYVASSLQSGVPSRFSGSGSGTEFTLTISSLQPEDFATYYCLQHNSYPLNFGGGTKVEIK

SEQ ID NO: 8365 - protein, 107 aa, Homo sapiens
  Light chain
DIQMTQSPSSLSASVGDRVTITCRASQGIRNDLGWYQQKPGKAPKRLIYVASSLQSGVPSRFSGSGSGTEFTLTISSLQPEDFATYYCLQHNSYPLPFGGGTKVEIK

SEQ ID NO: 8366 - protein, 107 aa, Homo sapiens; identical to SEQ ID NO: 8365
  Light chain

SEQ ID NO: 8367 - protein, 107 aa, Homo sapiens
  Light chain
DIQMTQSPSSLSASVGDRVTITCRASQGIRNDLGWYQQKPGKAPKRLIYVASSLQSGVPSRFSGSGSGTEFTLTISSLQPEDFATYYCLQHNSYPLSFGGGTKVEIK

SEQ ID NO: 8368 - protein, 107 aa, Homo sapiens; identical to SEQ ID NO: 14
  Light chain

SEQ ID NO: 8369 - protein, 107 aa, Homo sapiens; identical to SEQ ID NO: 14
  Light chain

SEQ ID NO: 8370 - protein, 107 aa, Homo sapiens; identical to SEQ ID NO: 14
  Light chain

SEQ ID NO: 8371 - protein, 107 aa, Homo sapiens
  Light chain
DIQMTQSPSSLSASVGDRVTITCRASQGIRNDLGWYQQKPGKAPKRLLYAASNLQLGVPSRFSGSGSETEFTLTISSLQPEDFATYYCLQHNSYPWTFGQGTKVEIK

SEQ ID NO: 8372 - protein, 107 aa, Homo sapiens; identical to SEQ ID NO: 8371
  Light chain

SEQ ID NO: 8373 - protein, 107 aa, Homo sapiens; identical to SEQ ID NO: 8371
  Light chain

SEQ ID NO: 8374 - protein, 107 aa, Homo sapiens; identical to SEQ ID NO: 8371
  Light chain

SEQ ID NO: 8375 - protein, 107 aa, Homo sapiens; identical to SEQ ID NO: 8371
  Light chain

SEQ ID NO: 8376 - protein, 107 aa, Homo sapiens; identical to SEQ ID NO: 8371
  Light chain

SEQ ID NO: 8377 - protein, 107 aa, Homo sapiens; identical to SEQ ID NO: 8371
  Light chain

SEQ ID NO: 8378 - protein, 107 aa, Homo sapiens; identical to SEQ ID NO: 8371
  Light chain

SEQ ID NO: 8379 - protein, 107 aa, Homo sapiens; identical to SEQ ID NO: 8371
  Light chain

SEQ ID NO: 8380 - protein, 107 aa, Homo sapiens; identical to SEQ ID NO: 8371
  Light chain

SEQ ID NO: 8381 - protein, 107 aa, Homo sapiens; identical to SEQ ID NO: 8371
  Light chain

SEQ ID NO: 8382 - protein, 107 aa, Homo sapiens; identical to SEQ ID NO: 8371
  Light chain

SEQ ID NO: 8383 - protein, 107 aa, Homo sapiens; identical to SEQ ID NO: 8371
  Light chain

SEQ ID NO: 8384 - protein, 107 aa, Homo sapiens; identical to SEQ ID NO: 8064
  Light chain

SEQ ID NO: 8385 - protein, 107 aa, Homo sapiens
  Light chain
DIQMTQSPSSLSASVGDRVTITCRASQGIRNDLGWYQQKPGEAPKRLIYVASSLQSGVPSRFSGSGSGTEFTLTISSLQPEDFATYYCLQHNSYTLTFGGGTKVEIK

SEQ ID NO: 8386 - protein, 107 aa, Homo sapiens; identical to SEQ ID NO: 8385
  Light chain

SEQ ID NO: 8387 - protein, 107 aa, Homo sapiens
  Light chain
DIQMTQSPSSLSASVGDRVTITCRASQGIRNDLGWYQQKPGKAPKRLIYVASSLQGGVPSRFSGSGSGTEFTLTISSLQPEDFATYYCLQHSSYPLTFGGGTKVEIK

SEQ ID NO: 8388 - protein, 107 aa, Homo sapiens
  Light chain
DIQMTQSPSSLSASVGDRVTITCRASQGIRNELGWYQQKPGKAPKRLIYAASSLQSGVPSRFSGSGSGTEFTLTISSLQPEDFATYYCLQHYISPWTFGQGTKVEIK

SEQ ID NO: 8389 - protein, 107 aa, Homo sapiens
  Light chain
DIQMTQSPSSLSASVGDRVTITCRASQGIRNELGWYQQKPGKAPKRLIYAASSLQSGVPSRFSGSGSGTEFTLTISSLQPEDFATYYCLQHYIYLWTFGQVTKVEIK

SEQ ID NO: 8390 - protein, 107 aa, Homo sapiens
  Light chain
DIQMTQSPSSLSASVGDRVTITCRASQGIRNELGWYQQKPGKAPKRLIYAASSLQSGVPSRFSGSGSGTEFTLTISSLQPEDFATYYCLQHYIYPCTFGQGTKVEIK

SEQ ID NO: 8391 - protein, 107 aa, Homo sapiens
  Light chain
DIQMTQSPSSLSASVGDRVTITCRASQGIRNELGWYQQKPGKAPKRLIYAASSLQSGVPSRFSGSGSGTEFTLTISSLQPEDFATYYCLQHYIYPGTFGQGTKVEIK

SEQ ID NO: 8392 - protein, 107 aa, Homo sapiens
  Light chain
DIQMTQSPSSLSASVGDRVTITCRASQGIRNELGWYQQKPGKAPKRLIYAASSLQSGVPSRFSGSGSGTEFTLTISSLQPEDFATYYCLQHYIYPLTFGQGTKVEIK

SEQ ID NO: 8393 - protein, 107 aa, Homo sapiens
  Light chain
DIQMTQSPSSLSASVGDRVTITCRASQGIRNELGWYQQKPGKAPKRLIYAASSLQSGVPSRFSGSGSGTEFTLTISSLQPEDFATYYCLQHYIYPWPFGQGTKVEIK

SEQ ID NO: 8394 - protein, 107 aa, Homo sapiens
  Light chain
DIQMTQSPSSLSASVGDRVTITCRASQGIRNELGWYQQKPGKAPKRLIYAASSLQSGVPSRFSGSGSGTEFTLTISSLQPEDFATYYCLQHYIYPWSFGQGTKVEIK

SEQ ID NO: 8395 - protein, 107 aa, Homo sapiens
  Light chain
DIQMTQSPSSLSASVGDRVTITCRASQGIRNELGWYQQKPGKAPKRLIYAASSLQSGVPSRFSGSGSGTEFTLTISSLQPEDFATYYCLQHYIYPWTFGQGTKVEIK

SEQ ID NO: 8396 - protein, 107 aa, Homo sapiens; identical to SEQ ID NO: 8395
  Light chain

SEQ ID NO: 8397 - protein, 107 aa, Homo sapiens
  Light chain
DIQMTQSPSSLSASVGDRVTITCRASQGIRNELGWYQQKPGKAPKRLIYAASSLQSGVPSRFSGSGSGTEFTLTISSLQPEDFATYYCLQHYIYQWTFGQGTKVEIK

SEQ ID NO: 8398 - protein, 107 aa, Homo sapiens
  Light chain
DIQMTQSPSSLSASVGDRVTITCRASQGIRNDLGWYQQKPGKAPKRLIYVASSLQSGVPSRFSGSGSGTEFTLTISSLQPEGFATYYCLQNNSYPLTFGGGTKVEIK

SEQ ID NO: 8399 - protein, 107 aa, Homo sapiens; identical to SEQ ID NO: 8398
  Light chain

SEQ ID NO: 8400 - protein, 107 aa, Homo sapiens
  Light chain
DIQMTQSPSSLSASVGDRVTITCRASQGIRNELGWYQQKPGKAPKRLIYAASSLQSGVPSRFSGSGSGTEFTLTISSLQPEDFATYYCLQNYIYPWTFGQGTKVEIK

SEQ ID NO: 8401 - protein, 107 aa, Homo sapiens
  Light chain
DIQMTQSPSTLSASVGDRVTITGRASQSIRNDLGWYQQKPGKAPKRLIYVASSLQSGVPSRFSGSGSGTEFTLTISSLQPEDFATYYCLQPNSYPLTFGGGPKVEIK

SEQ ID NO: 8402 - protein, 107 aa, Homo sapiens
  Light chain
DIQMTQSPSSLSASVGDRVTITCRASQGIRNDLGWYQQKPGKAPKRLIYAASSLQSGVPSRFSGSGSGTEFTLTISSLQPEDFATYYCLQYNCYPLTFGGGTKVEIK

SEQ ID NO: 8403 - protein, 107 aa, Homo sapiens
  Light chain
DIQMTQSPSSLSASVGDRVTITCRASQGIRNDLGWYQQKPGKAPKRLIYAASSLQSGVPSRFSGSGSGTEFTLTISSLQPEDFATYYCLQYNIYPLTFGGGTKVEIK

SEQ ID NO: 8404 - protein, 107 aa, Homo sapiens
  Light chain
DIQMTQSPSSLSASVGDRVTITCRASQGIRNDLGWYQQKPGKAPKRLIYVASSLQSGVPSRFSGSGSGTEFTLTISSLQPEDFATYYCLQYNRYPLTFGGGTKVEIK

SEQ ID NO: 8405 - protein, 107 aa, Homo sapiens
  Light chain
DIQMTQSPSSLSASVGDRVTITCRASQGIRNDLGWYQQKPGKAPKRLIYAASSLQSGVPSRFSGSGSGTEFTLTISSLQPEDFATYYCLQYNSSPLTFGGGTKVEIK

SEQ ID NO: 8406 - protein, 107 aa, Homo sapiens
  Light chain
DIQMTQSPSFLSASVGDRVTITCRASQGIRNDLGWYQQKPGKAPKRLIYVASSLQSGVPSRFSGSGSGTEFTLTISSLQPEDFATYYCLQYNSYHLTFGGGTKVEIK

SEQ ID NO: 8407 - protein, 107 aa, Homo sapiens
  Light chain
DIQMTQSPSSLSASVGDRVTITCRASQGIRNDLGWYQQKPGKAPKRLIYAASSLQSGIPSRFSGSGSGTEFTLTISSLQPEDFATYYCLQYNSYLLTFGGGTKVEIK

SEQ ID NO: 8408 - protein, 107 aa, Homo sapiens
  Light chain
DIQMTQSPSSLSASVGDRVTITCRASQGIRNDLGWYQQKPGKAPKRLIYAASSLQSGVPSRFSGSGSGTEFTLTISSLQPEDFATYYCLQYNSYPFTFGGGTKVEIK

SEQ ID NO: 8409 - protein, 107 aa, Homo sapiens
  Light chain
DIQMTQSPSSLSASVGDRVTITCRASQGIRNDLGWYQQKPGKAPKRLIYAASSLQSGVPSRFSGSGSGTEFTLTISSLQPEDFATYYCLQYNSYPITFGGGTKVEIK

SEQ ID NO: 8410 - protein, 107 aa, Homo sapiens
  Light chain
DIQMTQSPSSLSASVGDRVTITCRASQGIRNDLGWYQQKPGKAPKRLIYAASSLQSGVPSRFSGSGSGTEFTLTISSLQPEDFATYYCLQYNSYPLAFGGGTKVEIK

SEQ ID NO: 8411 - protein, 107 aa, Homo sapiens
  Light chain
DIQMTQSPSSLSASVGDRVTITCRASQGIRNDLGWYQQKPGKAPKRLIYAASNLQSGVPSRFSGSGSGTEFTLTISSLQPEDFATYYCLQYNSYPLNFGGGTKVEIK

SEQ ID NO: 8412 - protein, 107 aa, Homo sapiens
  Light chain
DIQMTQSPSSLSASVGDRVTITCRASQGIRNDLGWYQQKPGKAPKRLIYAASSLQSGVPSRFSGSGSGTEFTLTISSLQPEDFATYYCLQYNSYPLPFGGGTKVEIK

SEQ ID NO: 8413 - protein, 107 aa, Homo sapiens
  Light chain
DIQMTQSPSSLSASVGDRVTITCRASQGIRNDLGWYQQKPGKAPKRLIYAASSLQSGVPSRFSGSGSGTEFTLTISSLQPEDFATYYCLQYNSYPLSFGGGTKVEIK

SEQ ID NO: 8414 - protein, 107 aa, Homo sapiens; identical to SEQ ID NO: 8286
  Light chain

SEQ ID NO: 8415 - protein, 107 aa, Homo sapiens; identical to SEQ ID NO: 8286
  Light chain

SEQ ID NO: 8416 - protein, 107 aa, Homo sapiens; identical to SEQ ID NO: 8286
  Light chain

SEQ ID NO: 8417 - protein, 107 aa, Homo sapiens; identical to SEQ ID NO: 8286
  Light chain

SEQ ID NO: 8418 - protein, 107 aa, Homo sapiens; identical to SEQ ID NO: 8286
  Light chain

SEQ ID NO: 8419 - protein, 107 aa, Homo sapiens; identical to SEQ ID NO: 8286
  Light chain

SEQ ID NO: 8420 - protein, 107 aa, Homo sapiens; identical to SEQ ID NO: 8286
  Light chain

SEQ ID NO: 8421 - protein, 107 aa, Homo sapiens; identical to SEQ ID NO: 8286
  Light chain

SEQ ID NO: 8422 - protein, 107 aa, Homo sapiens; identical to SEQ ID NO: 8286
  Light chain

SEQ ID NO: 8423 - protein, 107 aa, Homo sapiens; identical to SEQ ID NO: 8286
  Light chain

SEQ ID NO: 8424 - protein, 107 aa, Homo sapiens; identical to SEQ ID NO: 8286
  Light chain

SEQ ID NO: 8425 - protein, 107 aa, Homo sapiens; identical to SEQ ID NO: 8286
  Light chain

SEQ ID NO: 8426 - protein, 107 aa, Homo sapiens; identical to SEQ ID NO: 8286
  Light chain

SEQ ID NO: 8427 - protein, 107 aa, Homo sapiens; identical to SEQ ID NO: 8286
  Light chain

SEQ ID NO: 8428 - protein, 107 aa, Homo sapiens; identical to SEQ ID NO: 8286
  Light chain

SEQ ID NO: 8429 - protein, 107 aa, Homo sapiens; identical to SEQ ID NO: 8286
  Light chain

SEQ ID NO: 8430 - protein, 107 aa, Homo sapiens; identical to SEQ ID NO: 8286
  Light chain

SEQ ID NO: 8431 - protein, 107 aa, Homo sapiens
  Light chain
DIQMTQSPSSLSASVGDRVTITCRASQGIRNDLGWYQQKPGKAPKRLIYAASSLQSGVPSRFSGSGSGTEFTLTISSLQPEDFATYYCLQYNSYPPTFGGGTKVEIK

SEQ ID NO: 8432 - protein, 107 aa, Homo sapiens
  Light chain
DIQMTQSPSSLSASVGDRVTITCRASQGISSWLAWYQQKPEKAPKSLIYAASSLQSGVPSRFSGSGSGTDFTLTISSLQPEDFATYYCLQYNSYPYTFGQGTKLEIK

SEQ ID NO: 8433 - protein, 107 aa, Homo sapiens
  Light chain
DIQMTQSPSSLSASVGDRVTITCRASQGIRNDLGWYQQKPGKAPKRLIYAASSLQSGVPSRFSGSGSGTEFTLTISSLQPEDFATYYCLQYNSYTLTFGGGSKVEIK

SEQ ID NO: 8434 - protein, 107 aa, Homo sapiens
  Light chain
DIQMTQSPSSLSASVGDRVTITCRASQGIRNDLGWYQQKPGKAPKRLIYAASSLQSGVPSRFSGSGSGTEFTLTISSLQPEDFATYYCLQYTSYPLTFGGGTKVEIK

SEQ ID NO: 8435 - protein, 107 aa, Homo sapiens
  Light chain
DIQMTQSPSSLSASVGDRVTITCRASQGITSWLAWYQQKPEKAPKSLIYAASSLQSGVPSRFSGGGSGTDFTLTITSLQPEDFATYFCPQYNSYPYTFRQETKLEIK

SEQ ID NO: 8436 - protein, 107 aa, Homo sapiens
  Light chain
EIVLTQSPATLSLSPGERATLSCRASQSVSSYLAWYQQKPGQAPRLLIYDASNRATGIPARFSGSGSGTDFTLTISSLEPEDFAVYYCQHRNTWPYTFGQETKLEIK

SEQ ID NO: 8437 - protein, 107 aa, Homo sapiens
  Light chain
DIQMTQSPSSLSASVGDRVTITCRASQGISSWLAWYQQKPEKAPKSLIYAASSLQSGVPSRFSGSGSGTDFTLTISSLQPEDFATYYCQHYNSYPYTFGQGTKLEIK

SEQ ID NO: 8438 - protein, 108 aa, Homo sapiens
  Light chain
DIQMTQSPGTLSLSPGERATLSCRASQSVSSSYLAWYQQKPGQAPRLLIYGASSRATGIPDRFSGSGSGTDFTLTISSLQPEDVATYYCQKYNSAPYTFGQGTKLEIR

SEQ ID NO: 8439 - protein, 107 aa, Homo sapiens
  Light chain
AIQLTQSPSSLSASVGDRVTITCRASQGISSALAWYQQKPGKAPKLLIYDASSLESGVPSRFSGSGSGTDFTLTISILHPEDFATYYCQLFNNYPWTFGQGTKVEIK

SEQ ID NO: 8440 - protein, 107 aa, Homo sapiens
  Light chain
DIQMTQSPSSLSASVGDRVTITCRASQGISSWLAWYQQKPEKAPKSLIYAASSLQSGVPSRFSGSGSGTDFTLTISSLQPEDFATYNCQLYNSYPYTFGQGTKLEIK

SEQ ID NO: 8441 - protein, 107 aa, Homo sapiens
  Light chain
DIQMTQSPSSLSASVGDRVTITCRASQGISSWLAWYQQKPEKAPKSLIYAASSLQSGVPSRFSGSGSGTDFTLTISSLQPEDFATYYCQQDNSYPYTFGQGTKLEIK

SEQ ID NO: 8442 - protein, 108 aa, Homo sapiens; identical to SEQ ID NO: 8242
  Light chain

SEQ ID NO: 8443 - protein, 107 aa, Homo sapiens
  Light chain
EIVMTQSPATLSLSPGERATLSCRTSQSVSSSYLSWYQQKPGQAPRLLIYDASTRATGIPARFSGSGSGTDFTLTISSLQPEDLAVYYCQQDYNLPTFGQGTKVEIK

SEQ ID NO: 8444 - protein, 107 aa, Homo sapiens
  Light chain
EIVMTQSPATLSLSPGERATLSCRASQSVSSSYLSWYQQKPGQAPRLLIYGASTRATGIPARFSGSGSGTGFTLTISSLQPEDFAVYYCQQDYNLYTFGQGTKLEIK

SEQ ID NO: 8445 - protein, 107 aa, Homo sapiens
  Light chain
AIQLTQSPSSLSASVGDRVTITCRASQGISSALAWYQQKPGKAPKLLIYDASSLESGVPSRFSGSGSGTDFTLTISSLQPEDFATYYCQQFDNYPWTFGQGTKVEIK

SEQ ID NO: 8446 - protein, 107 aa, Homo sapiens
  Light chain
AIQLTQSPSSLSASVGDRVTITCRASQGISSALAWYQQKPGKAPKLLIYDASSLESGVPSRFSGSGSGTDFTLTISSLQPEDFATYYCQQFNNYLWTFGQGTKVEIK

SEQ ID NO: 8447 - protein, 107 aa, Homo sapiens
  Light chain
AIQLTQSPSSLSASVGDRVTITCRASQGISSALAWYQQKPGKAPKLLIYDASSLESGVPSRFSGSGSGTDFTLTISSLQPEDFATYYCQQFNNYPCTFGQGTKVEIK

SEQ ID NO: 8448 - protein, 107 aa, Homo sapiens
  Light chain
AIQLTQSPSSLSASVGDRVTITCRASQGISSALAWYQQKPGKAPKLLIYDASSLESGVPSRFSGSGSGTDFTLTISSLQPEDFATYYCQQFNNYPLTFGGGTKVEIK

SEQ ID NO: 8449 - protein, 108 aa, Homo sapiens
  Light chain
AIQLTQSPSSLSASVGDRVTITCRASQGISSALAWYQQKPGKAPKLLIYDASSLESGVPSRFSGSGSGTDFTLTISSLQPEDFATYYCQQFNNYPMYTFGQGTKLEIK

SEQ ID NO: 8450 - protein, 107 aa, Homo sapiens
  Light chain
AIQLTQSPSSLSASVGDRVTITCRASQGISSALAWYQQKPGKAPKLLIYDASSLESGVPSRFSGSGSGTDFTLTISSLQPEDFATYYCQQFNNYPWKFGQGTKVEIK

SEQ ID NO: 8451 - protein, 107 aa, Homo sapiens
  Light chain
AIQLTQSPSSLSASVGDRVTITCRASQGISSALAWYQQKPGKAPKLLIYDASSLESGVPSRFSGSGSGTDFTLTISSLQPEDFATYYCQQFNNYPWPFGQGTKVEIK

SEQ ID NO: 8452 - protein, 107 aa, Homo sapiens
  Light chain
DIQMTQSPSSLSASVGDRVTITCRASQGISSWLAWYQQKPEKAPKSLIYAASSLQSGVPSRFSGSGSGTDFTLTISSLQPEDFATYYCQQFNNYPWSFGQVTKVEIK

SEQ ID NO: 8453 - protein, 107 aa, Homo sapiens
  Light chain
AIQLTQSPSSLSASVGDRVTITCRASQGISSALAWYQQKPGKAPKLLIYDASSLESGVPSRFSGSGSGTDFTLTISSLQPEDFATYYCQQFNNYPWTFGQGTKVEIK

SEQ ID NO: 8454 - protein, 107 aa, Homo sapiens; identical to SEQ ID NO: 8453
  Light chain

SEQ ID NO: 8455 - protein, 107 aa, Homo sapiens; identical to SEQ ID NO: 8453
  Light chain

SEQ ID NO: 8456 - protein, 107 aa, Homo sapiens; identical to SEQ ID NO: 8453
  Light chain

SEQ ID NO: 8457 - protein, 107 aa, Homo sapiens; identical to SEQ ID NO: 8453
  Light chain

SEQ ID NO: 8458 - protein, 107 aa, Homo sapiens; identical to SEQ ID NO: 8453
  Light chain

SEQ ID NO: 8459 - protein, 107 aa, Homo sapiens; identical to SEQ ID NO: 8453
  Light chain

SEQ ID NO: 8460 - protein, 107 aa, Homo sapiens; identical to SEQ ID NO: 8453
  Light chain

SEQ ID NO: 8461 - protein, 107 aa, Homo sapiens
  Light chain
AIQLTQSPSSLSASVGDRVTITCRASQGISSALAWYQQKPGKAPKLLIYDASSLESGVPSRFSGSGSGTDFTLTISSLQPEDFATYYCQQFNNYQWTFGQGTKVEIK

SEQ ID NO: 8462 - protein, 107 aa, Homo sapiens
  Light chain
AIQLTQSPSSLSASVGDRVTITCRASQGISSALAWYQQKPGKAPKLLIYDASSLESGVPSRFSGSGSGTDFTLTISSLQPEDFATYYCQQFNNYTWTFGQGTKVEIK

SEQ ID NO: 8463 - protein, 107 aa, Homo sapiens; identical to SEQ ID NO: 11
  Light chain

SEQ ID NO: 8464 - protein, 107 aa, Homo sapiens; identical to SEQ ID NO: 11
  Light chain

SEQ ID NO: 8465 - protein, 107 aa, Homo sapiens
  Light chain
DIQMTQSPSTLSASVGDRVTITCRASQSISSWLAWYQQKPGKAPKLLIYKASSLESGVPSRFSGSGSGTEFTLTISSLQPDDFATYYCQQHNSYIFTFGPGTKVDIK

SEQ ID NO: 8466 - protein, 107 aa, Homo sapiens
  Light chain
DIQMTQSPSFLSASVGDRVTITCRASQGISSYLAWYQQKPGKAPKLLIYAASTLQSGVPSRFSGSGSGTEFTLTISSLQPEDFATYYCQQHNSYPYTFGQGTKLEIK

SEQ ID NO: 8467 - protein, 107 aa, Homo sapiens; identical to SEQ ID NO: 8017
  Light chain

SEQ ID NO: 8468 - protein, 107 aa, Homo sapiens; identical to SEQ ID NO: 8017
  Light chain

SEQ ID NO: 8469 - protein, 107 aa, Homo sapiens
  Light chain
DIQLTQSPSFLSASVGDRVTITCRASQGISSYLAWYQQKPGKAPKLLIYAASTLQSGVPSRFSGSGSGTEFTLTISSLQPEDFATYYCQQLNSYPLTFGGGTKVEIK

SEQ ID NO: 8470 - protein, 107 aa, Homo sapiens
  Light chain
DIQLTQSPSFLSASVGDRVTITCRASQGISSSLAWYQQKPGKAPKLLIYAASTLQSGVPSRFSGSGSGTDFTLTISSLQPEDFAAYYCQQLNSYPRTFGQGTKVEIR

SEQ ID NO: 8471 - protein, 107 aa, Homo sapiens
  Light chain
DIQMTQSPSSLSASVGDRVTITCRASQGITSWLAWYQQKPEKAPKSLIYAASSLQSGVPSRFSGGGSGTDFTLTITSLQPEDFATYYCQQNNSYPYTFGQGTKLEIK

SEQ ID NO: 8472 - protein, 107 aa, Homo sapiens
  Light chain
EIVLTQSPATLSLSPGERATLSCRASQSVSSYLAWYQQKPGQAPRLLIYDASNRATGIPARFSGSGSGTDFTLTISSLEPEDFAVYYCQQRKTWPYTFGQGTKLEIK

SEQ ID NO: 8473 - protein, 107 aa, Homo sapiens; identical to SEQ ID NO: 25
  Light chain

SEQ ID NO: 8474 - protein, 107 aa, Homo sapiens
  Light chain
EIVLTQSPATLSLSPGERATLSCRASQSVSSYLAWYQQKPGQAHRLLIYDASNRASGVPARFSGSGSGTDFTLTISSLEPEDFAVYYCQQRNPWPYTFGQGTKLEIK

SEQ ID NO: 8475 - protein, 107 aa, Homo sapiens
  Light chain
EIVLTQSPATLSLSPGERATLSCRASQSVSSYLAWYQQKPGQAPRLLIYDASNRATGIPARFSGSGSGTDFNLTISSLEPEDFAVYYCQQRNTCPYTFLQPTNLEIK

SEQ ID NO: 8476 - protein, 107 aa, Homo sapiens
  Light chain
EIVLTQSPATLSLSPGERATLSCRASQSVSSYLAWYQQKPGQAPRLLIYDASNRATGIPARFSGSGSGTDFTLTISSLEPEDFAVYYCQQRNTLPYTFGQGTKLEIK

SEQ ID NO: 8477 - protein, 107 aa, Homo sapiens
  Light chain
EIVLTQSPATLSLSPGERATLSCRASQSVSSYLAWYQQKPGQAPRLLIYDASNRATGIPARFSGSGSGTDFTLTISSLEPEDFAVYYCQQRNTWPDTFGQGTKLEIK

SEQ ID NO: 8478 - protein, 107 aa, Homo sapiens
  Light chain
EIVLTQSPATLSLSPGERATLSCRASQSVSSYLAWYQQKPGQAPRLLIYDASNRATGIPARFSGSGSGTDFTLTISSLEPEDFAVYYCQQRNTWPHTFGQGTKLEIK

SEQ ID NO: 8479 - protein, 107 aa, Homo sapiens
  Light chain
EIVLTQSPATLSLSPGERATLSCRASQSVSSYLAWYQQKPGQAPRLLIYDASNRATGIPARFSGSGSGTDFTLTISSLEPEDFAVYYCQQRNTWPYPFGQGTKLEIK

SEQ ID NO: 8480 - protein, 107 aa, Homo sapiens
  Light chain
EIVLTQSPATLSLSPGERATLSCRASQSVSSYLAWYQQKPGQAPRLLIYDASNRATGIPARFSGSGSGTDFTLTISSLEPEDFAVYYCQQRNTWPYTFGQGTKLEIK

SEQ ID NO: 8481 - protein, 107 aa, Homo sapiens; identical to SEQ ID NO: 8480
  Light chain

SEQ ID NO: 8482 - protein, 107 aa, Homo sapiens; identical to SEQ ID NO: 8480
  Light chain

SEQ ID NO: 8483 - protein, 107 aa, Homo sapiens
  Light chain
EIVLTQSPATLSLSPGERATLSCRASQSVSSYLAWYQQKPGQAPRLLIYDASNRATGIPARFSGSGSGTDFTLTISSLEPEDFAVYYCQQRTTWPYTFGQGTKLEIK

SEQ ID NO: 8484 - protein, 107 aa, Homo sapiens
  Light chain
DIQMTQSPSSLSASVGDRVTITCRASQDISSWLAWYQQKPEKAPKSLIYAASSLQSEVPSRFSGSGSGTDFTLTISSLQPEDFATYYCQQSNSYPYTFGQGTKLEIK

SEQ ID NO: 8485 - protein, 107 aa, Homo sapiens
  Light chain
EIVLTQSPGTLSLSPGERATLSCRASQSVSSSYLAWYQQKPGQAPRLLIYGASSRATGIPDRFSGSGSGTDFTLTISRLEPEDFAVYYCQQYGSSITFGQGTRLEIK

SEQ ID NO: 8486 - protein, 108 aa, Homo sapiens
  Light chain
EIVLTQSPATLSLSPGERATLSCGASQSVSSSYLAWYQQKPGLAPRLLIYDASSRATGIPDRFSGSGSGTDFTLTISRLEPEDFAVYYCQQYGSSMYTFGQGTKLEIK

SEQ ID NO: 8487 - protein, 107 aa, Homo sapiens
  Light chain
DIQMTQSPSSLSASVGDRVTITCRASQGISSWLAWYQQKPEKAPKSLIYAASSLQSGVPSRFSGSGSGTDFTLTISSLQPEDFATYYCQQYNCYPYTFGQGTKLEIK

SEQ ID NO: 8488 - protein, 107 aa, Homo sapiens
  Light chain
EIVMTQSPATLSVSPGERATLSCRASQSVSSNLAWYQQKPGQAPRLLIYGASTRATGIPARFSDSGSGTEFTLTISSLQSEDFAVYCCQQYNHWPLTFGGGTKVEIK

SEQ ID NO: 8489 - protein, 107 aa, Homo sapiens
  Light chain
DIQMTQSPSSLSASVGDRVTITCRASQGISSWLAWYQQKPEKAPKSLIYAASSLQSGVPSRFSGSGSGTDFTLTISSLQPEDFATYYCQQYNIYPYTFGQGTKLEIK

SEQ ID NO: 8490 - protein, 107 aa, Homo sapiens
  Light chain
EIVMTQSPATLSVSPGERATLSCRASQSVSSNLAWFQQKPGQAPRLLIYGASTRATGIPARFSGSGSGTEFTLTISSLQSEDFAAYYCQQYNNWPYPFGQGTKLEIK

SEQ ID NO: 8491 - protein, 107 aa, Homo sapiens
  Light chain
EIVMTQSPATLSVSPGERATLSCRASQSVSSNLAWFQQKPGQAPRLLIYGASTRATGIPARFSGSGSGTEFTLTISSLQSEDFAAYYCQQYNNWPYTFGQGTKLEIK

SEQ ID NO: 8492 - protein, 107 aa, Homo sapiens; identical to SEQ ID NO: 8491
  Light chain

SEQ ID NO: 8493 - protein, 107 aa, Homo sapiens
  Light chain
EIVMTQSPATLSVSPGERATLSCRASQSVSSNLAWYQQKPGQAPRLLIYGASTRATGIPARFSGSGSGTEFTLTISSLQSEDFAVYYCQQYNNWPYTFGQGTKLEIK

SEQ ID NO: 8494 - protein, 107 aa, Homo sapiens; identical to SEQ ID NO: 8491
  Light chain

SEQ ID NO: 8495 - protein, 107 aa, Homo sapiens
  Light chain
DIQMTQSPSSLSASVGDRVTITCRASQGISRWLAWYQQKPEKAPKSLIYAASSLQSGVPSRFSGSGSGTDFTLTISSLQPEDFATYYCQQYNNYPYTFGQGTKLEIK

SEQ ID NO: 8496 - protein, 107 aa, Homo sapiens
  Light chain
DIQMTQSPSSLSASVGDRVTITCRASQGITSWLAWYQQKPEKAPKSLIYAASSLQSGVPSRFSGGGSGTDFTLTITSLQPEDFATYYCQQYNRYPYTFGQGTKLEIK

SEQ ID NO: 8497 - protein, 107 aa, Homo sapiens
  Light chain
DIQMTQSPSSLSASVGDRVTITCRASQGITSWLAWYQQKPEKAPKSLIYAASSLQSGVPSRFSGGGSGTDFTLTITSLQPEDFATYYCQQYNSSPYTFGQGTKLEIK

SEQ ID NO: 8498 - protein, 107 aa, Homo sapiens
  Light chain
DIQMTQSPSSLSASVGDRVTITCRASQGISSWLAWYQQKPEKAPKSLIYAASSLQSGVPSRFSGSGSGTDFTLTISSLQPEDFATYYCQQYNSYLYTFGQGTKLEIK

SEQ ID NO: 8499 - protein, 107 aa, Homo sapiens
  Light chain
DIQMTQSPSSLSASVGDRVTITCRASQGISSWLAWYQQKPEKAPKSLIYAASSLQSGVPSRFSGSGSGTDFTLTISSLQPEDFATYYCQQYNSYPDTFGQGTKLEIK

SEQ ID NO: 8500 - protein, 107 aa, Homo sapiens
  Light chain
DIQMTQSPSSLSASVGDRVTITCRASQGISSWLAWYQQKPEKAPKSLIYAASSLQSGVPSRFSGSGSGTDFTLTISSLQPEDFATYYCQQYNSYPHTFGQGTKLEIK

SEQ ID NO: 8501 - protein, 107 aa, Homo sapiens
  Light chain
DIQMTQSPSSLSASVGDRVTISCRASQGISRWLAWYQQKPEKAPKSLIYAASSLQSGVPSRFSGSGSGTDFTLTISSLQPEDFATYYCQQYNSYPLTFGGGTKVEIK

SEQ ID NO: 8502 - protein, 107 aa, Homo sapiens
  Light chain
DIQMTQSPSSLSASVGDRVTITCRASQGISSWLAWYQQKPEKAPKSLIYAASSLQSGVPSRFSGSGSGTDFTLTISSLQPEDFATYYCQQYNSYPNTFGQGTKLEIK

SEQ ID NO: 8503 - protein, 107 aa, Homo sapiens
  Light chain
DIQMTQSPSSLSASVGDRVTITCRASQGISSWLAWYQQKPEKAPKSLIYAASSLQSGVPSRFSGSGSGTDFTLTISSLQPEDFATYYCQQYNSYPPTFGQGTKVEIK

SEQ ID NO: 8504 - protein, 107 aa, Homo sapiens
  Light chain
DIQMTQSPSSLSASVGDRVTITCRASQGITSWLAWYQQKPEKAPKSLIYAASSLQSGVPSRFSGGGSGTDFTLTITSLQPEDFSTYYCQQYNSYPYNFGQGTKLEIK

SEQ ID NO: 8505 - protein, 107 aa, Homo sapiens
  Light chain
DIQMTQSPSSLSASVGDRVTITCRASQGISSWLAWYQQKPEKAPKSLIYAASSLQSGVPSRFSGSGSGTDFTLTISSLQPEDFATYYCQQYNSYPYPFGQGTKLEIK

SEQ ID NO: 8506 - protein, 107 aa, Homo sapiens
  Light chain
DIQMTQSPSSLSASVGDRVTITCRASQGISSWLAWYQQKPEKAPKSLIYAASSLQSGVPSRFSGSGSGTDFTLTISSLQPEDFATYYCQQYNSYPYSFGQGTKLEIK

SEQ ID NO: 8507 - protein, 107 aa, Homo sapiens
  Light chain
DIQMTQSPSSLSASVGDRVTITCRASQGISSWLAWYQQKPEKAPKSLIDAASSLQSGVPSRFSGSGSGTDFTLTISSLQPEDFATYYCQQYNSYPYTFGQGTKLEIK

SEQ ID NO: 8508 - protein, 107 aa, Homo sapiens; identical to SEQ ID NO: 10
  Light chain

SEQ ID NO: 8509 - protein, 107 aa, Homo sapiens; identical to SEQ ID NO: 8507
  Light chain

SEQ ID NO: 8510 - protein, 107 aa, Homo sapiens; identical to SEQ ID NO: 10
  Light chain

SEQ ID NO: 8511 - protein, 107 aa, Homo sapiens; identical to SEQ ID NO: 10
  Light chain

SEQ ID NO: 8512 - protein, 107 aa, Homo sapiens; identical to SEQ ID NO: 10
  Light chain

SEQ ID NO: 8513 - protein, 107 aa, Homo sapiens; identical to SEQ ID NO: 10
  Light chain

SEQ ID NO: 8514 - protein, 107 aa, Homo sapiens; identical to SEQ ID NO: 10
  Light chain

SEQ ID NO: 8515 - protein, 107 aa, Homo sapiens; identical to SEQ ID NO: 8507
  Light chain

SEQ ID NO: 8516 - protein, 107 aa, Homo sapiens; identical to SEQ ID NO: 10
  Light chain

SEQ ID NO: 8517 - protein, 107 aa, Homo sapiens
  Light chain
DIQMTQSPSSLSASVGDRVTITCRASQGISSWLAWYQQKPEKAPKSLIYAASSLQSGVPSRFSGSGSGTDFTLTISSLQPEDFATYYCQQYNSYQYTFGQGTKLEIK

SEQ ID NO: 8518 - protein, 107 aa, Homo sapiens
  Light chain
DIQMTQSPSSLSASVGDRVTITCRASQGITSWLAWYQQKPEKAPKSLIYAASSLQSGVPSRFSGGGSGTDFTLTITSLQPEDFATYYCQQYNSYRYTFGQGTKLEIK

SEQ ID NO: 8519 - protein, 107 aa, Homo sapiens
  Light chain
DIQMTQSPSTLSASVGDRVTITCRASQSISSWLAWYQQKPGKAPKLLIYKASSLESGVPSRFSGSGSGTEFTLTISSLQPDDFATYYCQQYNSYSYTFGQGTKLEIK

SEQ ID NO: 8520 - protein, 107 aa, Homo sapiens
  Light chain
DIQMTQSPSSLSASVGDRVTITCRASQGISSWLAWYQQKPEKAPKSLIYAASSLQSGVPSRFSGSGSGTDFTLTISSLQPEDFATYYCQQYNSYTYTFGQGTKLEIK

SEQ ID NO: 8521 - protein, 107 aa, Homo sapiens
  Light chain
DIQMTQSPSSLSASVGDRVTITCRASQGISNYLAWFQQKPGKAPKSLIYAASSLQSGVPSKFSGSGSGTDFTLTISTLQPEDFAAYSCQQYTSYPYTLGPATQLAIK

SEQ ID NO: 8522 - protein, 107 aa, Homo sapiens
  Light chain
EIVLTQSPDFQSVTPKEKVTITCRASQNIGSSLHWYQQKPDQSPKLLIKYASQSISGVPSRFSGSGSGTDFTLTINSLEAEDAAAYYCYQSSSLPHTFGQGTKLEIK

SEQ ID NO: 8523 - protein, 123 aa, Homo sapiens
  Heavy chain
QVQLQESGPGLVKPSETLSLTCTVSGDSIFSYYWSWIRQPAGKGLEWIGRIFTSGSTNYNPSLKSRVTMSVDTSKNQFSLKLSSVTAADTAVYYCARDYYGSGRRYYGMDVWGQGTTVTVSSA

SEQ ID NO: 8524 - protein, 123 aa, Homo sapiens; identical to SEQ ID NO: 8523
  Heavy chain

SEQ ID NO: 8525 - protein, 123 aa, Homo sapiens; identical to SEQ ID NO: 8523
  Heavy chain

SEQ ID NO: 8526 - protein, 123 aa, Homo sapiens; identical to SEQ ID NO: 8523
  Heavy chain

SEQ ID NO: 8527 - protein, 123 aa, Homo sapiens
  Heavy chain
QVQLQESGPGLVKPSETLSLTCTVSGDSIFSYYWSWIRQPAGKGLEWIGRIFTSGSTNYNPSLKSRVTMSVDTSKNQFSLKLSSVTAADTAVYYCARDYYGSGSRYYGMDVWGQGTTVTVSSA

SEQ ID NO: 8528 - protein, 123 aa, Homo sapiens; identical to SEQ ID NO: 8523
  Heavy chain

SEQ ID NO: 8529 - protein, 123 aa, Homo sapiens; identical to SEQ ID NO: 8523
  Heavy chain

SEQ ID NO: 8530 - protein, 123 aa, Homo sapiens
  Heavy chain
QVQLQESGPGLVKPSETLSLTCTVSGDSIFSYYWSWIRQPAGKGLEWIGRIFTSGSTNYNPSLKSRVTMSVDTSKNQFSLKLSSVTAADTAVYYCARDYDGSGRRYYGMDVWGQGTTVTVSSA

SEQ ID NO: 8531 - protein, 123 aa, Homo sapiens; identical to SEQ ID NO: 8523
  Heavy chain

SEQ ID NO: 8532 - protein, 123 aa, Homo sapiens; identical to SEQ ID NO: 8523
  Heavy chain

SEQ ID NO: 8533 - protein, 123 aa, Homo sapiens; identical to SEQ ID NO: 8523
  Heavy chain

SEQ ID NO: 8534 - protein, 123 aa, Homo sapiens; identical to SEQ ID NO: 8523
  Heavy chain

SEQ ID NO: 8535 - protein, 123 aa, Homo sapiens; identical to SEQ ID NO: 8523
  Heavy chain

SEQ ID NO: 8536 - protein, 124 aa, Homo sapiens
  Heavy chain
QVQLVQSGAEVKKPGASVKVSCKASGYTFTSYYMHWVRQALGQGLEWMGIINPSGGSTSYAQKFQGRVTMTRDTSTSTVYMELSSLRSEDTAVYYCATPVLRYFDWRDAFDIWGQGTMVTVSSA

SEQ ID NO: 8537 - protein, 123 aa, Homo sapiens
  Heavy chain
QVQLQESGPGLVKPSETLSLTCTVSGDSIFSYYWSWIRQPAGKGLEWIGRIFTSGSTNYNPSLKSRVTMSVDTSKNQFSLKLSSVTAADTAVYYCARDYYGSGRRYCGMDVWGQGTTVTVSSA

SEQ ID NO: 8538 - protein, 123 aa, Homo sapiens
  Heavy chain
QVQLQESGPGLVKPSETLSLTCTVSGDSIFSYYWSWIRQPAGKGLEWIGRIFTSGSTNYNPSLKSRVTMSVDTSKNQFSLKLSSVTAADTAVYYCARDYYGPGRRYYGMDVWGQGTTVTVSSA

SEQ ID NO: 8539 - protein, 123 aa, Homo sapiens; identical to SEQ ID NO: 8523
  Heavy chain

SEQ ID NO: 8540 - protein, 123 aa, Homo sapiens; identical to SEQ ID NO: 8523
  Heavy chain

SEQ ID NO: 8541 - protein, 123 aa, Homo sapiens; identical to SEQ ID NO: 8527
  Heavy chain

SEQ ID NO: 8542 - protein, 123 aa, Homo sapiens; identical to SEQ ID NO: 8527
  Heavy chain

SEQ ID NO: 8543 - protein, 115 aa, Homo sapiens
  Heavy chain
QVQLQESGPGLVKPSETLSLTCTVSGDSIFSYYWSWIRQPAGKGLEWIGRIFTSGSTNYNPSLKSRVTMSVDTSKNQFSLKLSSVTAADTAVYYCTTSTGGDYWGQGTLVTVSSA

SEQ ID NO: 8544 - protein, 123 aa, Homo sapiens; identical to SEQ ID NO: 8527
  Heavy chain

SEQ ID NO: 8545 - protein, 123 aa, Homo sapiens
  Heavy chain
QVQLQESGPGLVKPSETLSLTCTVSGDSIFSYYWSWIRQPAGKGLEWIGRIFTSGSTNYNPSLKSRVTMSVDTSKNQFSLKLSSVTAADTAVYYCARDYYGSGRRYYGIDVWGQGTTVTVSSA

SEQ ID NO: 8546 - protein, 123 aa, Homo sapiens; identical to SEQ ID NO: 8527
  Heavy chain

SEQ ID NO: 8547 - protein, 123 aa, Homo sapiens; identical to SEQ ID NO: 8527
  Heavy chain

SEQ ID NO: 8548 - protein, 123 aa, Homo sapiens
  Heavy chain
QVQLQESGPGLVKPSETLSLTCTVSGDSIFSYYWSWIRQPAGKGLEWIGRIFTSGSTNYNPSLKSRVTMSVDTSKNQFSLKLSSVTAADTAVYYCARDYYGSVRRYYGMDVWGQGTTVTVSSA

SEQ ID NO: 8549 - protein, 123 aa, Homo sapiens; identical to SEQ ID NO: 8530
  Heavy chain

SEQ ID NO: 8550 - protein, 123 aa, Homo sapiens; identical to SEQ ID NO: 8523
  Heavy chain

SEQ ID NO: 8551 - protein, 124 aa, Homo sapiens; identical to SEQ ID NO: 8536
  Heavy chain

SEQ ID NO: 8552 - protein, 124 aa, Homo sapiens; identical to SEQ ID NO: 8536
  Heavy chain

SEQ ID NO: 8553 - protein, 119 aa, Homo sapiens
  Heavy chain
QVQLQESGPGLVKPSETLSLTCTVSGDSIFSYYWSWIRQPAGKGLEWIGRIFTSGSTNYNPSLKSRVTISVDTSKNQFSLKLSSVTAADTAVYYCSRDRNIAKAFDIWGQGTMVTVSSA

SEQ ID NO: 8554 - protein, 123 aa, Homo sapiens; identical to SEQ ID NO: 8523
  Heavy chain

SEQ ID NO: 8555 - protein, 119 aa, Homo sapiens
  Heavy chain
QVQLQESGPGLVKPSETLSLTCTVSGDSIFSYYWSWIRQPAGKGLEWIGRIFTSGSTNYNPSLKSRVTMSVDTSKNQFSLKLSSVTAADTAVYYCARDYCGSGRRYYGMDVWGQGTTVT

SEQ ID NO: 8556 - protein, 123 aa, Homo sapiens; identical to SEQ ID NO: 8530
  Heavy chain

SEQ ID NO: 8557 - protein, 119 aa, Homo sapiens
  Heavy chain
QVQLQESGPGLVKPSETLSLTCTVSGDSIFSYYWSWIRQPAGKGLEWIGRIFTSGSTNYNPSLKSRVTMSVDTSKNQFSLKLSSVTAADTAVYYCAGDYYGSGRRYYGMDVWGQGTTVT

SEQ ID NO: 8558 - protein, 123 aa, Homo sapiens
  Heavy chain
QVQLQESGPGLVKPSETLSLTCTVSGDSIFSYYWSWIRQPAGKGLEWIGRIFTSGSTNYNPSLKSRVTMSVDTSKNQFSLKLSSVTAADTAVYYCARDYYGSGRRYYGMDYWGQGTLVTVSSA

SEQ ID NO: 8559 - protein, 123 aa, Homo sapiens; identical to SEQ ID NO: 8523
  Heavy chain

SEQ ID NO: 8560 - protein, 123 aa, Homo sapiens; identical to SEQ ID NO: 8523
  Heavy chain

SEQ ID NO: 8561 - protein, 124 aa, Homo sapiens; identical to SEQ ID NO: 8536
  Heavy chain

SEQ ID NO: 8562 - protein, 123 aa, Homo sapiens; identical to SEQ ID NO: 8527
  Heavy chain

SEQ ID NO: 8563 - protein, 123 aa, Homo sapiens; identical to SEQ ID NO: 8523
  Heavy chain

SEQ ID NO: 8564 - protein, 123 aa, Homo sapiens; identical to SEQ ID NO: 8530
  Heavy chain

SEQ ID NO: 8565 - protein, 123 aa, Homo sapiens; identical to SEQ ID NO: 8530
  Heavy chain

SEQ ID NO: 8566 - protein, 123 aa, Homo sapiens; identical to SEQ ID NO: 8527
  Heavy chain

SEQ ID NO: 8567 - protein, 123 aa, Homo sapiens; identical to SEQ ID NO: 8523
  Heavy chain

SEQ ID NO: 8568 - protein, 123 aa, Homo sapiens; identical to SEQ ID NO: 8523
  Heavy chain

SEQ ID NO: 8569 - protein, 123 aa, Homo sapiens; identical to SEQ ID NO: 8530
  Heavy chain

SEQ ID NO: 8570 - protein, 123 aa, Homo sapiens; identical to SEQ ID NO: 8530
  Heavy chain

SEQ ID NO: 8571 - protein, 123 aa, Homo sapiens; identical to SEQ ID NO: 8527
  Heavy chain

SEQ ID NO: 8572 - protein, 123 aa, Homo sapiens; identical to SEQ ID NO: 8523
  Heavy chain

SEQ ID NO: 8573 - protein, 123 aa, Homo sapiens; identical to SEQ ID NO: 8523
  Heavy chain

SEQ ID NO: 8574 - protein, 123 aa, Homo sapiens; identical to SEQ ID NO: 8523
  Heavy chain

SEQ ID NO: 8575 - protein, 119 aa, Homo sapiens; identical to SEQ ID NO: 8553
  Heavy chain

SEQ ID NO: 8576 - protein, 123 aa, Homo sapiens; identical to SEQ ID NO: 8523
  Heavy chain

SEQ ID NO: 8577 - protein, 123 aa, Homo sapiens; identical to SEQ ID NO: 8523
  Heavy chain

SEQ ID NO: 8578 - protein, 112 aa, Homo sapiens
  Heavy chain
QVQLVQSGAEVKKPGASVKISCKVSGYTLTELSIHWVRQAPGKGLEWMGGFDPEDDEAIYAQRFQGRVTMTEDTSTDTVYMELSSLRSEDTAVYYCTTSTGSDYWGQGTLVT

SEQ ID NO: 8579 - protein, 123 aa, Homo sapiens; identical to SEQ ID NO: 8537
  Heavy chain

SEQ ID NO: 8580 - protein, 123 aa, Homo sapiens
  Heavy chain
QVQLQESGPGLVKPSETLSLTCTVSGDSIFSYYWSWIRQPAGKGLEWIGRIFTSGSTNYNPSLKSRVTMSVDTSKNQFSLKLSSVTAADTAVYYCARDYYGSGRLYYGMDVWGQGTTVTVSSA

SEQ ID NO: 8581 - protein, 123 aa, Homo sapiens; identical to SEQ ID NO: 8523
  Heavy chain

SEQ ID NO: 8582 - protein, 123 aa, Homo sapiens; identical to SEQ ID NO: 8527
  Heavy chain

SEQ ID NO: 8583 - protein, 123 aa, Homo sapiens; identical to SEQ ID NO: 8523
  Heavy chain

SEQ ID NO: 8584 - protein, 123 aa, Homo sapiens; identical to SEQ ID NO: 8530
  Heavy chain

SEQ ID NO: 8585 - protein, 123 aa, Homo sapiens
  Heavy chain
QVQLQESGPGLVKPSETLSLTCTVSGDSIFSYYWSWIRQPAGKGLEWIGRIFTSGSTNYNPSLKSRVTMSVDTSKNQFSLKLSSVTAADTAVYYCARDCYGSGRRYYGMDVWGQGTTVTVSSA

SEQ ID NO: 8586 - protein, 123 aa, Homo sapiens; identical to SEQ ID NO: 8523
  Heavy chain

SEQ ID NO: 8587 - protein, 121 aa, Homo sapiens
  Heavy chain
QVQLVESGGGVVQPGRSLRLSCAASGFTFSIYGMHWVRQAPGKGLEWVAVIWYDGSNKYYADSVKGRFTISRDNSKNTLYLQMNSLRAEDTAVYYCARDILTGYYAFDIWGQGTMVTVSSA

SEQ ID NO: 8588 - protein, 124 aa, Homo sapiens
  Heavy chain
QVQLVQSGAEVKKPGASVKVSCKASGYTFTSYYMHWVRQALGQGLEWMGIINPSGGSTKYAQKFQGRVTMTRDTSTSTVYMELSSLRSEDTAVYYCATPVLRYFDWRDAFDIWGQGTMVTVSSA

SEQ ID NO: 8589 - protein, 124 aa, Homo sapiens; identical to SEQ ID NO: 8588
  Heavy chain

SEQ ID NO: 8590 - protein, 123 aa, Homo sapiens
  Heavy chain
QVQLQESGPGLVKPSETLSLTCTVFGDSISSYYWSWIRQLAGKGLEWIGRIYTNGRTNYNPSLKSRVTMSVDTSKNQFSLKLSSVTAADTAVYFCARDYYGSGRRYYGMDVWGPGTTVTVSSA

SEQ ID NO: 8591 - protein, 124 aa, Homo sapiens
  Heavy chain
EVQLVESGGGLVQPGRSLRLSRTASGFTFGDYAMSWFRQAPGKGLEWVGFIRSKAYGGTTEYAASVKGRFTISRDDSKSIAYLQMNSLKTEDTAVYYCTREGYSSGPNWFDPWGQGTLVTVSSA

SEQ ID NO: 8592 - protein, 123 aa, Homo sapiens; identical to SEQ ID NO: 8590
  Heavy chain

SEQ ID NO: 8593 - protein, 121 aa, Homo sapiens
  Heavy chain
QVQLVESGGGVVQPGRSLRLSCAASGFTFSSYGMHWVRQAPGKGLEWVAVIWYDGSNKYYADSVKGRFTISRDNSKNTLYLQMNSLRAEDTAVYYCARDIFTGYYAFDIWGQGTMVTVSSA

SEQ ID NO: 8594 - protein, 121 aa, Homo sapiens
  Heavy chain
QVQLVESGGGVVQPGRSLRLSCAASGFTFSSYGMHWVRQAPGKGLEWVAVIWYDGSNKYYADSVKGRFTISRDNSKNTLYLQMNSLRAEDTAVYYCARDMLTGYYAFDIWGQGTMVTVSSA

SEQ ID NO: 8595 - protein, 121 aa, Homo sapiens
  Heavy chain
QVQLVESGGGVVQPGRSLRLSCAASGFTFSIYGMHWVRQAPGKGLEWVAVIWYDGSNKYYADSVKGRFTISRDNSKNTLYLQMNSLRAEDTAVYYCARDSLTGYYAFDIWGQGTMVTVSSA

SEQ ID NO: 8596 - protein, 121 aa, Homo sapiens
  Heavy chain
QVQLVESGGGVVQPGRSLRLSCAASGFTFSSYGMHWVRQAPGKGLEWVAVIWYDGSNKYYADSVKGRFTISRDNSKNTLYLQMNSLRAEDTAVYYCARDIVTGYYAFDIWGQGTMVTVSSA

SEQ ID NO: 8597 - protein, 121 aa, Homo sapiens
  Heavy chain
QVQLVESGGGVVQPGRSLRLSCAASGFTFSIYGMHWVRQAPGKGLEWVAVIWYDGSNKYYADSVKGRFTISRDNSKNTLYLQMNSLRAEDTAVYYCERDILTGYYAFDIWGQGTMVTVSSA

SEQ ID NO: 8598 - protein, 121 aa, Homo sapiens
  Heavy chain
QVQLVESGGGVVQPGRSLRLSCAASGFTFSIYGMHWVRQAPGKGLEWVAVIWYDGSNKYYADSVKGRFTISRDNSKNTLYLQMNSLRAEDTAVYYCAGDILTGYYAFDIWGQGTMVTVSSA

SEQ ID NO: 8599 - protein, 121 aa, Homo sapiens
  Heavy chain
QVQLVQSGAEVKKPGASAKVSCKVSGYTLTELSMHWVRQAPGKGLEWMGGFDPEDGETIYAQKFQGRVTMTEDTSTDTAYMELSSLRSEDTAVYYCAISYGDYVRYFDYWGQGTLVTVSSA

SEQ ID NO: 8600 - protein, 121 aa, Homo sapiens
  Heavy chain
QVQLVESGGGVVQPGRSLRLSCAASGFTFSSYGMHWVRQAPGKGLEWVAVIWYDGSNKYYADSVKGRFTISRDNSKNTLYLQMNSLRAEDTAVYYCARDILTCYYAFDIWGQGTMVTVSSA

SEQ ID NO: 8601 - protein, 121 aa, Homo sapiens; identical to SEQ ID NO: 8587
  Heavy chain

SEQ ID NO: 8602 - protein, 124 aa, Homo sapiens; identical to SEQ ID NO: 8536
  Heavy chain

SEQ ID NO: 8603 - protein, 121 aa, Homo sapiens
  Heavy chain
QVQLVQSGAEVKKPGASVKVSCKASGYTFTSYGISWVRQALGQGLEWMGWISAYNGNTNYAQKLQGRVTMTTDTSTSTAYMELRSLRSDDTAVYYCARVTGTTGGYFDYWGQGTLVTVSSA

SEQ ID NO: 8604 - protein, 124 aa, Homo sapiens; identical to SEQ ID NO: 8536
  Heavy chain

SEQ ID NO: 8605 - protein, 124 aa, Homo sapiens
  Heavy chain
QVQLVQSGAEVKKPGASVKVSCKASGYTFTSYYMHWVRQALGQGLEWMGIINPSGGSTSYAQKFQGRVTMTRDTSTSTVYMELSSLRSEDTAVYYCATAVLRYFDWRDAFDIWGQGTMVTVSSA

SEQ ID NO: 8606 - protein, 124 aa, Homo sapiens; identical to SEQ ID NO: 8536
  Heavy chain

SEQ ID NO: 8607 - protein, 124 aa, Homo sapiens; identical to SEQ ID NO: 8536
  Heavy chain

SEQ ID NO: 8608 - protein, 124 aa, Homo sapiens; identical to SEQ ID NO: 8536
  Heavy chain

SEQ ID NO: 8609 - protein, 124 aa, Homo sapiens; identical to SEQ ID NO: 8536
  Heavy chain

SEQ ID NO: 8610 - protein, 127 aa, Homo sapiens
  Heavy chain
EVQLVESGGGLVQPGGSLRLSCAASGFTFSSYAMSWVRQAPGKGLEWVSAISGSGGSTYYADSVKGRFTISRDNSKNTLYLQMNSLRAEDTAVYYCAKEYCSSTRCYNYYYGMDVWGQGTTVTVSSA

SEQ ID NO: 8611 - protein, 124 aa, Homo sapiens
  Heavy chain
QVQLVQSGAEVKKPGASVKVSCKASGYTFTSYYMHWVRQALGQGLEWMGIINPSGGSTSYAQKFQGRVTMTRDTSTSTVYMELSSLRSEDTAVYYCATPVLRYVDWRDAFDIWGQGTMVTVSSA

SEQ ID NO: 8612 - protein, 121 aa, Homo sapiens; identical to SEQ ID NO: 8603
  Heavy chain

SEQ ID NO: 8613 - protein, 129 aa, Homo sapiens
  Heavy chain
EVQLVESGGGLVQPGGSLRLSCAASGFTFSSYAMSWVRQAPGKGLEWVSAISGSGGSTYYADSVKGRFTISRDNSKNTLYLQMNSLRAEDTAVYYCAKDRGITMVRGVILYYYGMDVWGQGTTVTVSSA

SEQ ID NO: 8614 - protein, 124 aa, Homo sapiens
  Heavy chain
QVQLVQSGAEVKKPGASVKVSCKASGYTFTSYYMHWVRQALGQGLEWMGIINPSGGSTSYAQKFQGRVTMTRDTSTSTVYMELSSLRSEDTAVYYCAAPVLRYFDWRDAFDIWGQGTMVTVSSA

SEQ ID NO: 8615 - protein, 124 aa, Homo sapiens
  Heavy chain
QVQLVQSGAEVKKPGASVKVSCKASGYTFTSYYMHWVRQALGQGLEWMGIINPSGGSTSYAQKFQGRVTMTRDTSTSTVYMELSSLRSEDTAVYYCATPGLRYFDWRDAFDIWGQGTMVTVSSA

SEQ ID NO: 8616 - protein, 124 aa, Homo sapiens
  Heavy chain
QVQLVQSGAEVKKPGASVKVSCKASGYTFTSYYMHWVRQALGQGLEWMGIINPSGGSTSYAQKFQGRVTMTRDTSTSTVYMELSSLRSEDTAVYYCATPVLRYFDCRDAFDIWGQGTMVTVSSA

SEQ ID NO: 8617 - protein, 119 aa, Homo sapiens
  Heavy chain
EVQLVESGGGLVQPGRSLRLSCTASGFTFGDYAMSWFRQAPGKGLEWVGFIRSKAFGGTTEYAASVKGRFTFSRDDSKSIAYLQMNSLKIEDTAVYYYTRGPYGMDVWGQGTTVTVSSA

SEQ ID NO: 8618 - protein, 124 aa, Homo sapiens
  Heavy chain
QVQLVQSGAEVKKPGASVKVSCKASGYTFTSYYMHWVRQALGQGLEWMGIINPSGGSTSYAQKFQGRVTMTRDTSTSTVYMELSSLRSEDTAVYYCATPVVRYFDWRDAFDIWGQGTMVTVSSA

SEQ ID NO: 8619 - protein, 124 aa, Homo sapiens; identical to SEQ ID NO: 8536
  Heavy chain

SEQ ID NO: 8620 - protein, 124 aa, Homo sapiens
  Heavy chain
QVQLVQSGAEVKKPGASVKVSCKASGYTFTSYYMHWVRQAPGQGLEWMGIINPSGGSTSYAQKFQGRVTMTRDTSTSTVYMELSSLRSEDTAVYYCATPELRYFDWRDAFDIWGQGTMVTVSSA

SEQ ID NO: 8621 - protein, 124 aa, Homo sapiens
  Heavy chain
QVQLVQSGAEVKKPGASVKVSCKASGYTFTSYYMHWVRQALGQGLEWMGIINPSGGSTSYAQKFQGRVTMTRDTSTSTVYMELSSLRSEDTAVYYCATPVLRYFDWMDAFDIWGQGTMVTVSSA

SEQ ID NO: 8622 - protein, 124 aa, Homo sapiens
  Heavy chain
QVQLVQSGAEVKKPGASVKVSCKASGYTFTSYYMHWVRQALGQGLEWMGIINPSGGSTSYAQKFQGRVTMTRDTSTSTVYMELSSLRSEDTAVYYCATPVLRYCDWRDAFDIWGQGTMVTVSSA

SEQ ID NO: 8623 - protein, 124 aa, Homo sapiens
  Heavy chain
QVQLVQSGAEVKKPGASVKVSCKASGYTFTSYYMHWVRQALGQGLEWMGIINPSGGSTSYAQKFQGRVTMTRDTSTSTVYMELSSLRSEDTAVYYCATSVLRYFDWRDAFDIWGQGTMVTVSSA

SEQ ID NO: 8624 - protein, 124 aa, Homo sapiens; identical to SEQ ID NO: 8536
  Heavy chain

SEQ ID NO: 8625 - protein, 124 aa, Homo sapiens
  Heavy chain
EVQLVESGGGLVQPGGSLRLSCAASGFTFSSYAMSWVRQALGKGLEWVSAISGSGGSTYYADSVKGRFTISRDNSKNTLYLQMNSLRAEDTAVYYCAKEGPPSGSYYKVFDYWGQGTLVTVSSA

SEQ ID NO: 8626 - protein, 121 aa, Homo sapiens
  Heavy chain
QVQLVQSGAEVKKPGASVKVSCKASGYTFTSYGISWVRQALGQGLEWMGWISAYNGNTNYAQKLQGRVTMTTDTSTSTAYMELRSLRSDDTAVYYCARVTGTAGGYFDYWGQGTLVAVSSA

SEQ ID NO: 8627 - protein, 115 aa, Homo sapiens; identical to SEQ ID NO: 126
  Heavy chain

SEQ ID NO: 8628 - protein, 123 aa, Homo sapiens
  Heavy chain
QVQLQQSGPGLVKPSQTLSLTCAISGDSVSSKSVAWNWIRQSPSRGLEWLGRTYYRSKWYIDYAVSVKSRININPDTSKNQFSLQLNSVTPEDTAVYYCARDLGVTEEFDYWGQGTLVTVSSA

SEQ ID NO: 8629 - protein, 115 aa, Homo sapiens; identical to SEQ ID NO: 126
  Heavy chain

SEQ ID NO: 8630 - protein, 123 aa, Homo sapiens; identical to SEQ ID NO: 8628
  Heavy chain

SEQ ID NO: 8631 - protein, 115 aa, Homo sapiens; identical to SEQ ID NO: 126
  Heavy chain

SEQ ID NO: 8632 - protein, 123 aa, Homo sapiens; identical to SEQ ID NO: 8628
  Heavy chain

SEQ ID NO: 8633 - protein, 115 aa, Homo sapiens; identical to SEQ ID NO: 126
  Heavy chain

SEQ ID NO: 8634 - protein, 123 aa, Homo sapiens; identical to SEQ ID NO: 8628
  Heavy chain

SEQ ID NO: 8635 - protein, 123 aa, Homo sapiens; identical to SEQ ID NO: 8628
  Heavy chain

SEQ ID NO: 8636 - protein, 115 aa, Homo sapiens
  Heavy chain
QVQLVESGGGVVQPGRSLRLSCAASGFTFSDYGMHWVRQAPGKGLEWVAVIWYDGSNKYYTDSVKGRFTISRDNSKNTLYLQMSSLRAEDAAVYYCAVSPFDYWGQGTLVTVSSA

SEQ ID NO: 8637 - protein, 123 aa, Homo sapiens; identical to SEQ ID NO: 8628
  Heavy chain

SEQ ID NO: 8638 - protein, 115 aa, Homo sapiens; identical to SEQ ID NO: 126
  Heavy chain

SEQ ID NO: 8639 - protein, 114 aa, Homo sapiens; identical to SEQ ID NO: 124
  Heavy chain

SEQ ID NO: 8640 - protein, 118 aa, Homo sapiens
  Heavy chain
QVQLQESGPGLVKPSETLSLTCTVSGGSISGHYWSWIRQPPGKGLEWIGYTYYSGNTNYNPSLKSRVTISVDTSKNQFSLKLNSVTAADTAVYYCARDEGATFFDYWGQGTLVTVSSA

SEQ ID NO: 8641 - protein, 118 aa, Homo sapiens
  Heavy chain
QVQLQESGPGLVKPSETLSLTCTVSGGSISGYYWSWIRQPPGKGLEWIGFIYYSGNTNYNPSLKSRVTISEDTSKNQFSLKLSSVTAADTAVYYCARDEGATFFDHWGQGTLVIVSSA

SEQ ID NO: 8642 - protein, 119 aa, Homo sapiens; identical to SEQ ID NO: 125
  Heavy chain

SEQ ID NO: 8643 - protein, 119 aa, Homo sapiens
  Heavy chain
QVQLVESGGGVVQPGRSLRLSCAASGFTFSSFGIHWVRQAPGKGLEWVGIIWYDGSIQYYADSVQGRFIISRDNSMSTANLQMNSLRADDTAIYFCAVDILTGSFDYWGQGTLVTVSSA

SEQ ID NO: 8644 - protein, 121 aa, Homo sapiens
  Heavy chain
EVQLVESGGDLVQPGGSLRLSCAASGFTFSIYAMSWVRQAPGKGLEWVSIINNSGDITYYADSVKGRFTISRDNSKNTLFLQMNSLRAEDTAVYYCAKKRLYSSAWYDYWGQGTLVTVSSA

SEQ ID NO: 8645 - protein, 115 aa, Homo sapiens
  Heavy chain
QVQLVESGGGVVQPGRSLRLSCAASGFTFSNYGMHWVRQAPGKGLEWVAVIWYDGSKKYYADSVKGRFNISRDNSINTLYLQMSSLRAEDTAVYHCASNPFDYWGQGTLVTVSSA

SEQ ID NO: 8646 - protein, 115 aa, Homo sapiens
  Heavy chain
QVQLVESGGGVVQPGRSLRLSCAASGFTFSSYGMHWVRQAPGKGLEWVAVVWYDGSNKYYADSVKGRFTISRDNSKNTLYLQMNSLRAEDTAVYYCTVNPFDYWGQGTLVTVSSA

SEQ ID NO: 8647 - protein, 118 aa, Homo sapiens; identical to SEQ ID NO: 8640
  Heavy chain

SEQ ID NO: 8648 - protein, 114 aa, Homo sapiens
  Heavy chain
QVQLVESGGGVVQPGRSLRLSCAASGFTFSDSGMHWVRQAPGKGLEWVAVIWYDGSKKYYVDSVKGRFTISRDNSKNTLYLQMNSLRAEDTAVYYCAAEGDYWGQGTLVTVSSA

SEQ ID NO: 8649 - protein, 114 aa, Homo sapiens; identical to SEQ ID NO: 124
  Heavy chain

SEQ ID NO: 8650 - protein, 126 aa, Homo sapiens
  Heavy chain
QVQLQQSGPGLVKPSQTLSLTCAISGDSVSSNSAAWNWIRQSPSRGLEWLGRTFYRSKWYTDYAVSVKSRITINPDTSKNQFSLQLNSVTPEDTAVYYCARRYYGSVSYYGMDVWGQGTTVTVSSA

SEQ ID NO: 8651 - protein, 114 aa, Homo sapiens
  Heavy chain
QVQLVESGGGVVQPGRSLRLSCAASGFTFSDSGMHWVRQAPGKGLEWVAVIWYDGSKKYYVDSVKGRFTISRDNSKNTLYLQMNSLRAEDTAVYYCSTEGDYWGQGTLVTVSSA

SEQ ID NO: 8652 - protein, 114 aa, Homo sapiens
  Heavy chain
QVQLVESGGGVVQPGRSLRLSCAASGFTFSDSGMHWVRQAPGKGLEWVAVIWYDGSKKYYVDSVKGRFTISRDNSKNTLYLQMNSLRAEDTAVYYCATDGDYWGQGTLVTVSSA

SEQ ID NO: 8653 - protein, 114 aa, Homo sapiens
  Heavy chain
QVQLVESGGGVVQPGRSLRLSCAASGFTFSDSGMHWVRQAPGKGLEWVAVIWYDGSKKYYVDSVKGRFTISRDNSKNTLYLQMNSLRAEDTAVYYCATEVDYWGQGTLVTVSSA

SEQ ID NO: 8654 - protein, 114 aa, Homo sapiens
  Heavy chain
QVQLVESGGGVVQPGRSLRLSCAASGFTFSDSGMHWVRQAPGKGLEWVAVIWYDGSKKYYVDSVKGRFTISRDNSKNTLYLQMNSLRAEDTAVYYCASEGDYWGQGTLVTVSSA

SEQ ID NO: 8655 - protein, 119 aa, Homo sapiens; identical to SEQ ID NO: 125
  Heavy chain

SEQ ID NO: 8656 - protein, 114 aa, Homo sapiens; identical to SEQ ID NO: 124
  Heavy chain

SEQ ID NO: 8657 - protein, 114 aa, Homo sapiens
  Heavy chain
QVQLVESGGGVVQPGRSLRLSCAASGFTFSDSGMHWVRQAPGKGLEWVAVIWYDGSKKYYVDSVKGRFTISRDNSKNTLYLQMNSLRAEDTAVYYCVTEGDYWGQGTLVTVSSA

SEQ ID NO: 8658 - protein, 114 aa, Homo sapiens
  Heavy chain
QVQLVESGGGVVQPGRSLRLSCAASGFTFSDSGMHWVRQAPGKGLEWVAVIWYDGSKKYYVDSVKGRFTISRDNSKNTLYLQMNSLRAEDTAVYYCTTEGDYWGQGTLVTVSSA

SEQ ID NO: 8659 - protein, 117 aa, Homo sapiens
  Heavy chain
QVQLVQSGAEVKKPGASVKVSCKASGYTFTSYGISWVRQALGQGLEWMGWISAYNGNTNYAQKLQGRVTMTTDTSTSTAYMELRSLRSDDTAVYYCARGTGVLDYWGQGTLVTVSSA

SEQ ID NO: 8660 - protein, 117 aa, Homo sapiens; identical to SEQ ID NO: 8659
  Heavy chain

SEQ ID NO: 8661 - protein, 129 aa, Homo sapiens
  Heavy chain
EVQLVESGGGVVRPGGSLRLSCAASGFTFDDYGMSWVRQALGKGLEWVSGINWNGGSTGYADSVKGRFTISRDNAKNSLYLQMNSLRAEDTALYHCARDRNYYGSGSYYDDYYGMDVWGQGTTVTVSSA

SEQ ID NO: 8662 - protein, 129 aa, Homo sapiens; identical to SEQ ID NO: 8661
  Heavy chain

SEQ ID NO: 8663 - protein, 124 aa, Homo sapiens
  Heavy chain
QLQLQESGAGLLKPSETLSLTCNVSGGSISSSSYYWGWIRQPPGKGLEWIGNIYYSGSTHYNPSLKSRVTMSVDTSKNQFSLNLNSVTAADTAVYYFASVLRYFDWFFPPGYWGQGALVTVSSA

SEQ ID NO: 8664 - protein, 117 aa, Homo sapiens
  Heavy chain
QVQLVQSGAEVKKPGASVKVSCKASGYTFTSYGISWVRQALGQGLEWMGWISAYNGNTNYAQKLQGRVTMTTDTSTSTAYMELRSLRSDDTAVYYCARGTGVIDYWGQGTLVTVSSA

SEQ ID NO: 8665 - protein, 117 aa, Homo sapiens; identical to SEQ ID NO: 8664
  Heavy chain

SEQ ID NO: 8666 - protein, 117 aa, Homo sapiens; identical to SEQ ID NO: 8659
  Heavy chain

SEQ ID NO: 8667 - protein, 129 aa, Homo sapiens; identical to SEQ ID NO: 8661
  Heavy chain

SEQ ID NO: 8668 - protein, 117 aa, Homo sapiens
  Heavy chain
QVQLVQSGAEVKKPGASVKVSCKASGYTFTSYGISWVRQALGQGLEWMGWISAYNGNTNYAQKLQGRVTMTTDTSTSTAYMELRSLRSDDTAVYYCARGTGDLDYWGQGTLVTVSSA

SEQ ID NO: 8669 - protein, 117 aa, Homo sapiens
  Heavy chain
QVQLVQSGAEVKKPGASVKVSCKASGYTFTSYGISWVRQALGQGLEWMGWISAYNGNTNYAQKLQGRVTMTTDTSTSTAYMELRSLRSDDTAVYYCARGTGALDYWGQGTLVTVSSA

SEQ ID NO: 8670 - protein, 117 aa, Homo sapiens
  Heavy chain
QVQLVQSGAEVKKPGASVKVSCKASGYTFTSYGISWVRQALGQGLEWMGWISAYNGNTNYAQKLQGRVTMTTDTSTSTAYMELRSLRSDDTAVYYCARGTGVLDSWGQGTLVTVSSA

SEQ ID NO: 8671 - protein, 117 aa, Homo sapiens; identical to SEQ ID NO: 8659
  Heavy chain

SEQ ID NO: 8672 - protein, 117 aa, Homo sapiens
  Heavy chain
QVQLVQSGAEVKKPGASVKVSCKASGYTFTSYGISWVRQALGQGLEWMGWISAYNGNTNYAQKLQGRVTMTTDTSTSTAYMELRSLRSDDTAVYYCARVTGVLDYWGQGTLVTVSSA

SEQ ID NO: 8673 - protein, 117 aa, Homo sapiens
  Heavy chain
QVQLVQSGAEVKKPGASVKVSCKASGYTFTSYGISWVRQAPGQGLEWMGWISAYNGNTNYAQKLQGRVTMTTDTSTSTAYMELRSLRSDDTAVYYCASGTGVLDYWGQGTLVTVSSA

SEQ ID NO: 8674 - protein, 129 aa, Homo sapiens; identical to SEQ ID NO: 8661
  Heavy chain

SEQ ID NO: 8675 - protein, 117 aa, Homo sapiens; identical to SEQ ID NO: 8669
  Heavy chain

SEQ ID NO: 8676 - protein, 117 aa, Homo sapiens; identical to SEQ ID NO: 8668
  Heavy chain

SEQ ID NO: 8677 - protein, 117 aa, Homo sapiens; identical to SEQ ID NO: 8670
  Heavy chain

SEQ ID NO: 8678 - protein, 117 aa, Homo sapiens
  Heavy chain
QVQLVQSGAEVKKPGASVKVSCKASGYTFTSYGISWVRQALGQGLEWMGWISAYNGNTNYAQKLQGRVTMTTDTSTSTAYMELRSLRSDDTAVYYCARGPGVLDYWGQGTLVTVSSA

SEQ ID NO: 8679 - protein, 117 aa, Homo sapiens; identical to SEQ ID NO: 8673
  Heavy chain

SEQ ID NO: 8680 - protein, 117 aa, Homo sapiens; identical to SEQ ID NO: 8672
  Heavy chain

SEQ ID NO: 8681 - protein, 117 aa, Homo sapiens
  Heavy chain
QVQLVQSGAEVKKPGASVKVSCKASGYTFTSYGISWVRQALGQGLEWMGWISAYNGNTNYAQKLQGRVTMTTDTSTSTAYMELRSLRSDDTAVYYCARGTGGLDYWGQGTLVTVSSA

SEQ ID NO: 8682 - protein, 117 aa, Homo sapiens
  Heavy chain
QVQLVQSGAEVKKPGASVKVSCKASGYTFTSYGISWVRQAPGQGLEWMGWISAYNGNTNYAQKLQGRVTMTTDTSTSTAYMELRSLRSDDTAVYYCARGTGVFDYWGQGTLVTVSSA

SEQ ID NO: 8683 - protein, 117 aa, Homo sapiens; identical to SEQ ID NO: 8659
  Heavy chain

SEQ ID NO: 8684 - protein, 129 aa, Homo sapiens
  Heavy chain
EVQLVESGGGVVRPGGSLRLSCAASGFTFDDYGMSWVRQAPGKGLEWVSGINWNGGSTGYADSVKGRFTISRDNAKNSLYLQMNSLRAEDTALYHCARDRKYYGSGSYYDDYYGMDVWGQGTTVTVSSA

SEQ ID NO: 8685 - protein, 129 aa, Homo sapiens
  Heavy chain
EVQLVESGGGVVRPGGSLRLSCVASGFTFDDYGMSWVRQVPGKGLEWVSGINWNGGSTDYADSVKGRFTISRDNAKNSLYLQMNSLRAEDTALYHCARDRNYDGSGSYYDDYYGMDVWGQGTTVTVSSA

SEQ ID NO: 8686 - protein, 129 aa, Homo sapiens; identical to SEQ ID NO: 8661
  Heavy chain

SEQ ID NO: 8687 - protein, 117 aa, Homo sapiens; identical to SEQ ID NO: 8659
  Heavy chain

SEQ ID NO: 8688 - protein, 118 aa, Homo sapiens; identical to SEQ ID NO: 117
  Heavy chain

SEQ ID NO: 8689 - protein, 127 aa, Homo sapiens; identical to SEQ ID NO: 118
  Heavy chain

SEQ ID NO: 8690 - protein, 119 aa, Homo sapiens; identical to SEQ ID NO: 119
  Heavy chain

SEQ ID NO: 8691 - protein, 124 aa, Homo sapiens; identical to SEQ ID NO: 120
  Heavy chain

SEQ ID NO: 8692 - protein, 118 aa, Homo sapiens
  Heavy chain
QVQLVESGGGVVQPGRSLRLSCAASGFTFNNFGMHWVRQAPGKGLEWVAVIWYDGSNKYYVDSVKGRFTISRDNSKNTLYLQMNSLRAEDTAVYYCAGGGSYYGDYWGQGTLVTVSSA

SEQ ID NO: 8693 - protein, 122 aa, Homo sapiens; identical to SEQ ID NO: 121
  Heavy chain

SEQ ID NO: 8694 - protein, 118 aa, Homo sapiens
  Heavy chain
QVQLVESGGGVVQPGRSLRLSCAASGFTFSSYGMYWVRQAPGKGLEWVAVIWFDGSNKFYADSVKGRFTISRDNSKNTLYLQMNSLRAEDTAVYYCAGGGSYYGDHWGQGTLVTVSSA

SEQ ID NO: 8695 - protein, 118 aa, Homo sapiens
  Heavy chain
QVQLVESGGGVVQPGRSLRLSCAASGFTFSNYGMHWVRQAPGKGPEWVAVIWYDGSNKYYADSVKGRFTISRDNSKNTLYLQMNSLRAEDTAVYYCAGGGNYYGDYWGQGTLVTVSSA

SEQ ID NO: 8696 - protein, 118 aa, Homo sapiens; identical to SEQ ID NO: 8695
  Heavy chain

SEQ ID NO: 8697 - protein, 118 aa, Homo sapiens; identical to SEQ ID NO: 8692
  Heavy chain

SEQ ID NO: 8698 - protein, 127 aa, Homo sapiens
  Heavy chain
QVQLVQSGAEVKKPGASVKVSCQASGYTFTSYDISWVRQAPGQGLEWMGWISAYNGNTNYAQKLQGRVTLTTDTSTSTAYMELRSLRSDDTAVYYCARRYYDILTEGGYYYVMDVWGQGTTVTVSSA

SEQ ID NO: 8699 - protein, 118 aa, Homo sapiens; identical to SEQ ID NO: 8695
  Heavy chain

SEQ ID NO: 8700 - protein, 127 aa, Homo sapiens
  Heavy chain
QVQLVQSGTEVKKPGASVKVSCQASGYTFTSYDISWVRRAPGQGLEWMGWISAYNGNTNYAQKLQGRVTLTTDTSTSTAYMELRSLRSDDTAVYYCARRYYDILTEGGYYYVLDAWGQGTTVTVSSA

SEQ ID NO: 8701 - protein, 118 aa, Homo sapiens; identical to SEQ ID NO: 8695
  Heavy chain

SEQ ID NO: 8702 - protein, 126 aa, Homo sapiens; identical to SEQ ID NO: 122
  Heavy chain

SEQ ID NO: 8703 - protein, 122 aa, Homo sapiens
  Heavy chain
QVQLVQSGAEVKKPGASVKVSCKASGYTFTSYYMHWVRQAPGQGLEWMGIINPSGGSTSYAQKFQGRVTMTRDTSTRTVYMELSSLRSEDTAVYYCARYGVWGSCRSLDYWGQGTLVTVSSA

SEQ ID NO: 8704 - protein, 117 aa, Homo sapiens; identical to SEQ ID NO: 123
  Heavy chain

SEQ ID NO: 8705 - protein, 126 aa, Homo sapiens
  Heavy chain
QVQLVESGGGVVQPGRSLRLSCAASGFTFSNYGMHWVRQAPGKGLEWVAIIWYDGSNKYYADSMKGRFTISRDNSKNTLYLQMNSLRAEDTAVYFCARLYYYDSNGYYPDAFDIWGQGTMVTVSSA

SEQ ID NO: 8706 - protein, 118 aa, Homo sapiens; identical to SEQ ID NO: 8692
  Heavy chain

SEQ ID NO: 8707 - protein, 115 aa, Homo sapiens
  Heavy chain
QVQLVESGGGVVQPGRSLRLSCAASGFTFSNYGMHWVRQAPGKGLEWVAVIWYDGSNKNYVDSVKGRFTISRDNSKNTLYLQMNSLRAEDTAVYYCAVNPFDYWGQGTPVTVSSA

SEQ ID NO: 8708 - protein, 118 aa, Homo sapiens
  Heavy chain
QVQLVESGGGVVQPGRSLRLSCAASGFTFSSYGMYWVRQAPGKGLEWVAVIWYDGSNKYYADSVKGRFTVSRDNSRNTLYLQMNSLRVEDTAVYYCTGGGSYYGDYWGQGTLVTVSSA

SEQ ID NO: 8709 - protein, 118 aa, Homo sapiens; identical to SEQ ID NO: 117
  Heavy chain

SEQ ID NO: 8710 - protein, 119 aa, Homo sapiens
  Heavy chain
QVQLVESGGGVVQPGRSLRLSCAASGFTFSSYGMHWVRQAPGKGLEWVAVIWYDGSNKYYADSVKGRFTISRDNSKNTLYLQMNSLRAEDTAVYYCASIVGASGPEIWGQGTMVTVSSA

SEQ ID NO: 8711 - protein, 127 aa, Homo sapiens
  Heavy chain
QVQLVQSGTEVKKPGASVKVSCQASGYTFTSYDISWVRRAPGQGLEWMGWISAYNGNTNYAQKLQGRVTLTTDTSTSTAYMELRSLRSDDTAVYYCARRYYDIVTEGGYYYVLDVWGQGTTVTVSSA

SEQ ID NO: 8712 - protein, 118 aa, Homo sapiens; identical to SEQ ID NO: 8694
  Heavy chain

SEQ ID NO: 8713 - protein, 119 aa, Homo sapiens; identical to SEQ ID NO: 119
  Heavy chain

SEQ ID NO: 8714 - protein, 127 aa, Homo sapiens
  Heavy chain
QVQLVQSGTEVKKPGASVKVSCQASGYTFTSYDISWVRRAPGQGLEWMGWISAYNGNTNYAQKLQGRVTLTTDTSTSTAYMELRSLRSDDTAVYYCARRYYDILTEGGYYYVLNVWGQGTTVTVSSA

SEQ ID NO: 8715 - protein, 118 aa, Homo sapiens; identical to SEQ ID NO: 8695
  Heavy chain

SEQ ID NO: 8716 - protein, 118 aa, Homo sapiens; identical to SEQ ID NO: 8692
  Heavy chain

SEQ ID NO: 8717 - protein, 121 aa, Homo sapiens
  Heavy chain
QLQLQESGPGLVKPSETLSLTCTVSGGSISSSSYFWGWIRQPPGKGLEWIGSIYYSGSTYYNPSLKSRVTISVDTSKNQFSLKLSSVTAADTAVYYCARDMDIVATTDYWGQGTLVTVSSA

SEQ ID NO: 8718 - protein, 118 aa, Homo sapiens
  Heavy chain
QVQLVESGGGVVQTGRSLRLSCAASGFTFSTYGLHWVRQAPGKGLEWVAVIWFDGINKYYADSVKGRFTISRDNSKNTLYLQMNSLRAEDTAVYYCARSGDWYFDLWGRGTLVTVSSA

SEQ ID NO: 8719 - protein, 118 aa, Homo sapiens; identical to SEQ ID NO: 8695
  Heavy chain

SEQ ID NO: 8720 - protein, 119 aa, Homo sapiens
  Heavy chain
QVQLVESGGGVVQPGRSLRLSCAASGFTFSNYGMYWVRQAPGKGLEWVAVIWYDGSNKYYADSVKGRFTISRDNSKNTLYLQMKSLRAEDTAVYYCVGGGDILTGDYWGQGTLVTVSSA

SEQ ID NO: 8721 - protein, 126 aa, Homo sapiens
  Heavy chain
QVQLVESGGGVVQPGRSLRLSCAASGFTFSNYGMHWVRQAPGKGLEWVAIIWYDGSNKYYADSMKGRFTISRDNSKNTLYLQMNSLRAEDTAVYFCARLYYYDSNGYYPDPFDIWGQGTMVTVSSA

SEQ ID NO: 8722 - protein, 127 aa, Homo sapiens
  Heavy chain
QVQLVQSGTEVKKPGASVKVSCQASGYTFTSYDISWVRRAPGQGLEWMGWISAYNGNTNYAQKLQGRVTLTTDTSTSTAYMELRSLRSDDTAVYYCARRYYDIWTEGGYYYVLDAWGQGTTVTVSSA

SEQ ID NO: 8723 - protein, 124 aa, Homo sapiens
  Heavy chain
EVQLVESGGGLVQPGGSLRLSCAASGFTFSFYDMHWVRQATGKGLEWVSAIDTAGDTYYPGSVKGRFTMSRENAKNSLYLQMNSLRAGDTAVYYCARGYCSSTNCFADYFDYWGQGILVTVSST

SEQ ID NO: 8724 - protein, 118 aa, Homo sapiens; identical to SEQ ID NO: 117
  Heavy chain

SEQ ID NO: 8725 - protein, 118 aa, Homo sapiens; identical to SEQ ID NO: 117
  Heavy chain

SEQ ID NO: 8726 - protein, 118 aa, Homo sapiens; identical to SEQ ID NO: 117
  Heavy chain

SEQ ID NO: 8727 - protein, 126 aa, Homo sapiens
  Heavy chain
QVQLVESGGGVVQPGRSLRLSCAASGFTFSSYGLHWVRQAPGKGLEWVAVIWYDGSNKYYADSVKGRFTISRDNSKNTLYLQMNSLRAEDTAVYYCARVYYYDSSGYYYEYFDHWGQGTLVTVSSA

SEQ ID NO: 8728 - protein, 118 aa, Homo sapiens; identical to SEQ ID NO: 8692
  Heavy chain

SEQ ID NO: 8729 - protein, 127 aa, Homo sapiens
  Heavy chain
QVQLVQSGAEVKKPGASVKVSCQASGYTFTSYDISWVRQAPGQGLEWMGWISAYNGNTNYAQKLQGRVTLTTDTSTSTAYMELRSLRSDDTAVYYCARRYYDIWTEGGYYYVMDVWGQGTTVTVSSA

SEQ ID NO: 8730 - protein, 122 aa, Homo sapiens
  Heavy chain
QVQLVQSGAEVKKPGASVKVSCKVSGYTLTELSMHWVRQAPGKGLEWMGGFDPEDGETIYAQKFQGRVTMTEDTSTDTAYMELSSLRSEDTAVYYCSRWDLRYYYYGMDVWGQGTTVTVSSA

SEQ ID NO: 8731 - protein, 119 aa, Homo sapiens
  Heavy chain
QVQLVESGGGVVQPGRSLRLSCAASGFTFSNYGMYWVRQAPGKGLEWVAVIWYDGSNKYYADSVKGRFTISRDNSKNTLYLQMNSLRAEDTAVYYCAGGGDIWTGDYWGQGTLVTVSSA

SEQ ID NO: 8732 - protein, 124 aa, Homo sapiens
  Heavy chain
EVQLVESGGGLVQPGGSLRLSCAASGFTFSFYDMHWVRQAKGKGLEWVSAIGTAGDTYYPGSVKGRFTISRENAKNSLYLQMNSLRAGDTAVYYCARGDCSTTNCFADYFDYWGQGTLVTVSSA

SEQ ID NO: 8733 - protein, 118 aa, Homo sapiens; identical to SEQ ID NO: 117
  Heavy chain

SEQ ID NO: 8734 - protein, 123 aa, Homo sapiens
  Heavy chain
QVQLVQSGAEVKKPGASVKVSCKASGYTFTNYGISWVRQAPGQGLEWMGWISAYNGNTNYAQKVQGRVTMTTDTSTSTAYMELRSLRSDDTAVYYCARFYYYGSGGGAFDIWGQGTMVTVSSA

SEQ ID NO: 8735 - protein, 118 aa, Homo sapiens; identical to SEQ ID NO: 117
  Heavy chain

SEQ ID NO: 8736 - protein, 118 aa, Homo sapiens; identical to SEQ ID NO: 117
  Heavy chain

SEQ ID NO: 8737 - protein, 124 aa, Homo sapiens; identical to SEQ ID NO: 120
  Heavy chain

SEQ ID NO: 8738 - protein, 119 aa, Homo sapiens; identical to SEQ ID NO: 119
  Heavy chain

SEQ ID NO: 8739 - protein, 118 aa, Homo sapiens
  Heavy chain
QVQLVESGGGVVQPGRSLRLSCAASGFTFSNFGMHWVRQAPGKGLEWVAVIWYDGGNKYYADSVKGRFTVSRDNSKNTLYLQMNSLRAEDTAVYYCAGGGSYYGDYWGQGTLVTVSSA

SEQ ID NO: 8740 - protein, 118 aa, Homo sapiens; identical to SEQ ID NO: 115
  Heavy chain

SEQ ID NO: 8741 - protein, 115 aa, Homo sapiens
  Heavy chain
QVQLVESGGGVVQPGRSLRLSCAASGFTFSSYGMHWVRQAPGKGLEWVAVIWYDGSNKYYADSVKGRFTISRDNSKNTLYLQMNSLRAEDTAVYYCAVNPFDYWGQGTLVTVSSA

SEQ ID NO: 8742 - protein, 125 aa, Homo sapiens
  Heavy chain
QVQLQESGPGLVKPSETLSLTCTVSGGSISSYYWSWIRQPAGKGLEWIGRIFTRGNTSFNPSLKSRVTMSVDTSKNQFSLKLNSVTAADTAVYYCARDGDYYGSGSYYHAFDIWGQGTMVTVSSA

SEQ ID NO: 8743 - protein, 118 aa, Homo sapiens
  Heavy chain
QVQLVESGGGVVQPGRSLRLSCAASGFTFSSYGMYWVRQAPGKGLEWVAVIWYDGSNKYYADSVKGRFTISRDNSKNTLYLQMNSLRAEDTAVYYCAGGGNYYGDYWGQGTLVTVSSA

SEQ ID NO: 8744 - protein, 118 aa, Homo sapiens; identical to SEQ ID NO: 116
  Heavy chain

SEQ ID NO: 8745 - protein, 118 aa, Homo sapiens; identical to SEQ ID NO: 8743
  Heavy chain

SEQ ID NO: 8746 - protein, 118 aa, Homo sapiens; identical to SEQ ID NO: 8739
  Heavy chain

SEQ ID NO: 8747 - protein, 118 aa, Homo sapiens
  Heavy chain
QVQLVESGGGVVQPGRSLRLSCAASGFTFSDYGMHWVRQAPGKGLEWVAVIWYDGSNQYYADSVKGRFTISRDNSKNTLYLQMNSLRAEDTAVYYCAGGGNYYGDFWGQGTLVTVSSA

SEQ ID NO: 8748 - protein, 121 aa, Homo sapiens
  Heavy chain
QVQLQQWGAGLLKPSETLSLTCAVYGGSFSDYYWSWIRQPPGKGLEWIGEINHSGSTNYNPSLKSRVTISVDTSKNQFSLKLSSVTAADTAVYYRARGRYFDWLFPFDLWGRGTLVTVSSA

SEQ ID NO: 8749 - protein, 115 aa, Homo sapiens
  Heavy chain
QVQLVESGGGVVQPGRSLRLSCAASGFTFSSYGMHWVRQAPGKGLEWVAVIWYDGSNKYYADSVKGRFTISRDNSKNTLYLQMNSLRAEDTAVYYCAVNPFDHWGQGTLVTVSSA

SEQ ID NO: 8750 - protein, 125 aa, Homo sapiens; identical to SEQ ID NO: 8742
  Heavy chain

SEQ ID NO: 8751 - protein, 118 aa, Homo sapiens; identical to SEQ ID NO: 8739
  Heavy chain

SEQ ID NO: 8752 - protein, 118 aa, Homo sapiens; identical to SEQ ID NO: 8739
  Heavy chain

SEQ ID NO: 8753 - protein, 118 aa, Homo sapiens
  Heavy chain
QVQLVESGGGVVQPGRSLRLTCAASGFIFSSYGMYWVRQAPGKGLEWVAVIWYDGSNKYYADSVKGRFTISRDNSKNTLYLQMNSLRAEDTAVYYCTGGGNYYGDYWGQGTLVTVSSA

SEQ ID NO: 8754 - protein, 118 aa, Homo sapiens; identical to SEQ ID NO: 8743
  Heavy chain

SEQ ID NO: 8755 - protein, 118 aa, Homo sapiens; identical to SEQ ID NO: 8743
  Heavy chain

SEQ ID NO: 8756 - protein, 125 aa, Homo sapiens; identical to SEQ ID NO: 8742
  Heavy chain

SEQ ID NO: 8757 - protein, 118 aa, Homo sapiens; identical to SEQ ID NO: 116
  Heavy chain

SEQ ID NO: 8758 - protein, 118 aa, Homo sapiens; identical to SEQ ID NO: 8739
  Heavy chain

SEQ ID NO: 8759 - protein, 118 aa, Homo sapiens
  Heavy chain
QVQLQESGPGLVKPSETLSLTCTVSGGSISSYYWSWIRQPPGKGLEWIGYIYYSGSTNYNPSLKSRVTISEDTSKNQFSLKLSSVTAADTAVYYCARDEGATVFDYWGQGTLVTVSSA

SEQ ID NO: 8760 - protein, 124 aa, Homo sapiens
  Heavy chain
QVQLVESGGGLVKPGGSLRLSCAASGFTFSDYYMSWIRQAPGKGLEWVSYISSSGSTIYYADSVKGRFTISRDNAKNSLYLQMNSLRAEDTAVYYCARESLITMVRGVILDYWGQGTLVTVSSA

SEQ ID NO: 8761 - protein, 118 aa, Homo sapiens; identical to SEQ ID NO: 8739
  Heavy chain

SEQ ID NO: 8762 - protein, 120 aa, Homo sapiens
  Heavy chain
QVQLQESGPGLVKPSETLSLTCTVSGGSISSYYWSWIRQPAGKGLEWIGRIFTRGNTSFNPSLKSRVTISVDTSKNQFSLKLSSVTAADTAVYYCAGYGSGRKGWFDPWGQGTLVTVSSA

SEQ ID NO: 8763 - protein, 115 aa, Homo sapiens; identical to SEQ ID NO: 8741
  Heavy chain

SEQ ID NO: 8764 - protein, 125 aa, Homo sapiens; identical to SEQ ID NO: 8742
  Heavy chain

SEQ ID NO: 8765 - protein, 125 aa, Homo sapiens
  Heavy chain
QVQLQQSGPGLVKPSQTLSLTCAISGDSVSSNSAAWNWIRQSPSRGLEWLGRTYYRSKWYNDYAVSVKSRITINPDTSKNQFSLQLNSVTPEDTAVYCCARHNWNYYYYGMDVWGQGTTVTVSSA

SEQ ID NO: 8766 - protein, 125 aa, Homo sapiens; identical to SEQ ID NO: 8742
  Heavy chain

SEQ ID NO: 8767 - protein, 125 aa, Homo sapiens; identical to SEQ ID NO: 8742
  Heavy chain

SEQ ID NO: 8768 - protein, 125 aa, Homo sapiens; identical to SEQ ID NO: 8742
  Heavy chain

SEQ ID NO: 8769 - protein, 118 aa, Homo sapiens; identical to SEQ ID NO: 8743
  Heavy chain

SEQ ID NO: 8770 - protein, 118 aa, Homo sapiens; identical to SEQ ID NO: 8739
  Heavy chain

SEQ ID NO: 8771 - protein, 118 aa, Homo sapiens; identical to SEQ ID NO: 8747
  Heavy chain

SEQ ID NO: 8772 - protein, 118 aa, Homo sapiens; identical to SEQ ID NO: 115
  Heavy chain

SEQ ID NO: 8773 - protein, 125 aa, Homo sapiens; identical to SEQ ID NO: 8742
  Heavy chain

SEQ ID NO: 8774 - protein, 116 aa, Homo sapiens
  Heavy chain
QVQLVESGGGVVQPGRSLRVSCVVSGFTFNNYGMHWVRQAPGKGLEWVAVIWYDGSNKYYADSVKGRFTISRDNSKNTLYLQMNSLRVEDTAVYYCARGGGLDVWGQGTTVTVSSA

SEQ ID NO: 8775 - protein, 126 aa, Homo sapiens
  Heavy chain
QVQLQESGPGLVKPSETLSLTCTVSGGSISSYYWSWIRQPAGKGLEWIGRIFTRGNTSFNPSLKSRVTMSVDTSKNQFSLKLNSVTAADTAVYYCARDGDYYGSGSYYSDAFDIWGQGTVVTVSSA

SEQ ID NO: 8776 - protein, 118 aa, Homo sapiens; identical to SEQ ID NO: 8739
  Heavy chain

SEQ ID NO: 8777 - protein, 118 aa, Homo sapiens; identical to SEQ ID NO: 8739
  Heavy chain

SEQ ID NO: 8778 - protein, 125 aa, Homo sapiens; identical to SEQ ID NO: 8742
  Heavy chain

SEQ ID NO: 8779 - protein, 126 aa, Homo sapiens
  Heavy chain
QVQLVQSGAEVKKPGASVKVSCKASGYTFTSYGINWVRQAPGQGLEWMGWISAYNGNRNYAQNLQGRVTMTSDTSTNTAYMELRSLRSYDTAVYYCARDHYDILTGYYKGGFDYWGQGTLVTVSSA

SEQ ID NO: 8780 - protein, 115 aa, Homo sapiens; identical to SEQ ID NO: 112
  Heavy chain

SEQ ID NO: 8781 - protein, 118 aa, Homo sapiens
  Heavy chain
QVQLVESGGGVVQPGRSLRLSCAASGFTFSNYGMHWVRQAPGKGLEWVAVIWYDGSNKYYADSVKGRFTISRDNSKNTLYLQMNSLRAEDTAVYYCAGGGDYYGDYWGQGTLVTVSSA

SEQ ID NO: 8782 - protein, 123 aa, Homo sapiens
  Heavy chain
QVQLVQSGAEVKKPGASVKVSCKASGYTFPSYGISWVRQAPGQGLEWMGWISAYSGNTNYAQKLQGRVTLTTDTSTSTAYMELRSLRSDDTAVYYCSRDGSHGDYYYGMDVWGQGTTVTVSSA

SEQ ID NO: 8783 - protein, 123 aa, Homo sapiens; identical to SEQ ID NO: 113
  Heavy chain

SEQ ID NO: 8784 - protein, 118 aa, Homo sapiens
  Heavy chain
QVQLVESGGGVVQPGRSLRLSCAASGFTFSSYGMHWVRQAPGKGLEWVAVIWYDGSNKYYVDSVKGRFTISRDNSKNTLYLQMNSLRAEDTAVYYCAGGGSYYGDYWGQGTLVTVSSA

SEQ ID NO: 8785 - protein, 118 aa, Homo sapiens; identical to SEQ ID NO: 114
  Heavy chain

SEQ ID NO: 8786 - protein, 123 aa, Homo sapiens
  Heavy chain
QVQLVQSGAEVKKPGASVKVSCKASGYTFTSYGISWVRQAPGQGLEWMGWISAYSVNTNYAQKLQGRVTMTTDTSTSTAYMELRTLRSDDTAVYYCARDGAVADYYYVMDVWGQGTTVTVSSA

SEQ ID NO: 8787 - protein, 121 aa, Homo sapiens
  Heavy chain
QVQLQESGPGLVKPSETLSLTCTVSGGSISSYYWSWIRQPPGKGLEWIGYIYYSGSTNYNPSLKSRVTISVDTSKNQFSLKLSSVTAADTAVYFCARDDYYISGSSFDYWGQGTTVTVSSA

SEQ ID NO: 8788 - protein, 121 aa, Homo sapiens
  Heavy chain
QVQLQESGPGLVKPSETLSLTCTVSGGSISSYYWSWIRQPPGKGLEWIGYIYYSGSTNYNPSLKSRVTISVDTSKNQFSLKLSSVTAADTAVYYCARDDYYVSGSSFDYWGQGTLVTVSSA

SEQ ID NO: 8789 - protein, 126 aa, Homo sapiens
  Heavy chain
QVQLVQSGAEVKKPGASVKVSCKASGYTFTSYGINWVRQAPGQGLEWMGWISAYNGNRNYAQNLQGRVTMTSDTSTNTAYMELRSLRSYDTAVYYCARDHYDILTGYYEGGFDYWGQGTLVTVSSA

SEQ ID NO: 8790 - protein, 126 aa, Homo sapiens
  Heavy chain
QVQLVQSGAEVKKPGASVKVSCKASGYTFTSYGINWVRQAPGQGLEWMGWISAYNGNRNYAQNLQGRVTMTSDTSTNTAYMELRSLRSYDTAVYYCARDHYDTLTGYYKGGFDYWGQGTLVTVSSA

SEQ ID NO: 8791 - protein, 123 aa, Homo sapiens
  Heavy chain
QVQLVQSGAEVKKPGASVKVSCKASGYTFTSYGISWVRQAPGQGLEWMGWISAYSDNTNYPQKLQGRVTMTTDTSTSTAYMELRSLRSDDTAVYYCARDGSHGDYYYGMDVWGQGTTVTVSSA

SEQ ID NO: 8792 - protein, 126 aa, Homo sapiens
  Heavy chain
QVQLVQSGAEVKKPGASVKVSCKASGYTFTSYGINWVRQAPGQGLEWMGWISAYNGNRNYAQNLQGRVTMTSDTSTNTAYMELRSLRSYDTAVYYCARDHYDSLTGYYKGGFDYWGQGTLVTVSSA

SEQ ID NO: 8793 - protein, 123 aa, Homo sapiens; identical to SEQ ID NO: 8791
  Heavy chain

SEQ ID NO: 8794 - protein, 123 aa, Homo sapiens
  Heavy chain
QVQLVQSGAEVKKPGASVKVSCKASGYTFTTYGISWVRQAPGQGLEWMGWISAHNGNTNYAQKFQGRVTMTTDTSTSTAYMELRSLRSDDTAVYYCVRDGAVSDYYYGMDVWGQGTTVTVSSA

SEQ ID NO: 8795 - protein, 126 aa, Homo sapiens
  Heavy chain
QVQLVQSGAEVKKPGASVKVSCKASGYTFTSYGINWVRQAPGQGLEWMGWISAYNGNRNYAQNLQGRVTMTSDTSTNTAYMELRSLRSYDTAVYYCARDHYDILTGYYKGGFDVWGQGTTVTVSSA

SEQ ID NO: 8796 - protein, 126 aa, Homo sapiens
  Heavy chain
QVQLVQSGAEVKKPGASVKVSCKASGYTFTSYGINWVRQAPGQGLEWMGWISAYNGNRNYAQNLQGRVTMTSDTSTNTAYMELRSLRSYDTAVYYCARDHYDIWTGYYKGGFDYWGQGTLVTVSSA

SEQ ID NO: 8797 - protein, 126 aa, Homo sapiens
  Heavy chain
QVQLVQSGAEVKKPGASVKVSCKASGYTFTSYGINWVRQAPGQGLEWMGWISAYNGNRNYAQNLQGRVTMTSDTSTNTAYMELRSLRSYDTAVYYCARDQYDILTGYYKGGFDYWGQGTLVTVSSA

SEQ ID NO: 8798 - protein, 126 aa, Homo sapiens
  Heavy chain
QVQLVQSGAEVKKPGASVKVSCKASGYTFTSYGINWVRQAPGQGLEWMGWISAYNGNRNYAQNLQGRVTMTSDTSTNTAYMELRSLRSYDTAVYYCARDHDDILTGYYKGGFDYWGQGTLVTVSSA

SEQ ID NO: 8799 - protein, 126 aa, Homo sapiens
  Heavy chain
QVQLVQSGAEVKKPGASVKVSCKASGYTFTSYGINWVRQAPGQGLEWMGWISAYNGNRNYAQNLQGRVTMTSDTSTNTAYMELRSLRSYDTAVYYCARDNYDILTGYYKGGFDYWGQGTLVTVSSA

SEQ ID NO: 8800 - protein, 126 aa, Homo sapiens
  Heavy chain
QVQLVQSGAEVKKPGASVKVSCKASGYTFTSYGINWVRQAPGQGLEWMGWISAYNGNRNYAQNLQGRVTMTSDTSTNTAYMELRSLRSYDTAVYYCARDHYDMLTGYYKGGFDYWGQGTLVTVSSA

SEQ ID NO: 8801 - protein, 126 aa, Homo sapiens
  Heavy chain
QVQLVQSGAEVKKPGASVKVSCKASGYTFTSYGINWVRQAPGQGLEWMGWISAYNGNRNYAQNLQGRVTMTSDTSTNTAYMELRSLRSYDTAVYYCARAHYDILTGYYKGGFDYWGQGTLVTVSSA

SEQ ID NO: 8802 - protein, 115 aa, Homo sapiens; identical to SEQ ID NO: 112
  Heavy chain

SEQ ID NO: 8803 - protein, 123 aa, Homo sapiens; identical to SEQ ID NO: 113
  Heavy chain

SEQ ID NO: 8804 - protein, 123 aa, Homo sapiens
  Heavy chain
QVQLVQSGAEVKKPGASVKVSCKASGYTFTSYGISWVRQALGQGLEWMGWISAYNGNTNYAQKLQGRITMTTDTSTSTAYMELRSLRSDDTAVYYCARGMGLGQWLVPFDYWGQGTLVTVSSA

SEQ ID NO: 8805 - protein, 126 aa, Homo sapiens
  Heavy chain
QVQLVQSGAEVKKPGASVKVSCKASGYTFTSYGINWVRQAPGQGLEWMGWISAYNGNRNYAQNLQGRVTMTSDTSTNTAYMELRSLRSYDTAVYYCARDHYDISTGYYKGGFDYWGQGTLVTVSSA

SEQ ID NO: 8806 - protein, 115 aa, Homo sapiens; identical to SEQ ID NO: 112
  Heavy chain

SEQ ID NO: 8807 - protein, 126 aa, Homo sapiens
  Heavy chain
QVQLVQSGAEVKKPGASVKVSCKASGYTFTSYGINWVRQAPGQGLEWMGWISAYNGNRNYAQNLQGRVTMTSDTSTNTAYMELRSLRSYDTAVYYCARDHYDILAGYYKGGFDYWGQGTLVTVSSA

SEQ ID NO: 8808 - protein, 126 aa, Homo sapiens; identical to SEQ ID NO: 8779
  Heavy chain

SEQ ID NO: 8809 - protein, 118 aa, Homo sapiens
  Heavy chain
QVQLVESGGGVVQPGRSLRLSCAASGFTFSNYGMHWVRLAPGKGLEWVAVIWYDGSNKYYTDSVKGRFTISRDNSKNTLYLQMNSLRAEDTAVYYCAGGGNYYGDYWGQGTLVTVSSA

SEQ ID NO: 8810 - protein, 126 aa, Homo sapiens
  Heavy chain
QVQLVQSGAEVKKPGASVKVSCKASGYTLNSYGISWVRQAPGQGLEWMGWISAYNVNTNYAQKLQGRVTMTTDTSTSTVYMELRSLRSDDTAVYYCARDHYDILTGYYKGGFDYWGQGTLVTVSSA

SEQ ID NO: 8811 - protein, 125 aa, Homo sapiens
  Heavy chain
QVQLQESGPGLVKPSETLSLTCTVSGGSINNYYWNWIRQSAGKGLEWIRHIYTSGRTNINPSLKSRFTMSVDTPKNQFSLKLTSVTAADTAVYFCARRFIALTGNDYNYGMDVWGQGTTVTVSSA

SEQ ID NO: 8812 - protein, 122 aa, Homo sapiens
  Heavy chain
QVQLVQSGAEVKKPGASVKVSCKSSGYTFTSYGISWVRQALGQGLEWMGWISAYNGNTNYAQKLQGRVTMTTDTSTSTAYMELRSLRSDDTAVYYCARNYGSGSYYPLDYWGQGTLVTVSST

SEQ ID NO: 8813 - protein, 124 aa, Homo sapiens
  Heavy chain
QVQLVQSGAEVKKPGASVKVSCKSSGYTFTSYGISWVRQALGQGLEWMGWISAYNGNTNYAQKLQGRVTMTTDTSTSTAYMELRSLRSDDTAVYYCARWDYYGSGSLNWFDPWGQGTLVTVSSA

SEQ ID NO: 8814 - protein, 116 aa, Homo sapiens
  Heavy chain
QVQLQESGPGLVKPSETLSLTCTVSGGSISSYYWSWIRQPAGKVLEWIGRIYTSGSTNYNPSLKSRVTTSVDTSKNQFSLKLSSVTAADTAVYYCARDELGMRIWGQGTMVTVSSA

SEQ ID NO: 8815 - protein, 126 aa, Homo sapiens
  Heavy chain
QVQLVQSGAEVKKPGASVKVSCKASGYTLNSYGISWVRQAPGQGLEWMGWISAYNVNTNYAQKLQGRVTMTTDTSTSTVYMELRSLRSDDTAVYYCARDHYDSLTGYYKGGFDYWGQGTLVTVSSA

SEQ ID NO: 8816 - protein, 125 aa, Homo sapiens; identical to SEQ ID NO: 8811
  Heavy chain

SEQ ID NO: 8817 - protein, 125 aa, Homo sapiens
  Heavy chain
QVQLQESGPGLVKPSETLSLTCTVSGGSINNYYWNWIRQSAGKGLEWIGHIYTSGRTNINPSLKSRVTMSVDTSKNQFSLKLTSVTAADTAVYFCARRFIARTGNDYNYGMDVWGQGTTVTVSSA

SEQ ID NO: 8818 - protein, 124 aa, Homo sapiens; identical to SEQ ID NO: 8813
  Heavy chain

SEQ ID NO: 8819 - protein, 121 aa, Homo sapiens
  Heavy chain
QVQLVQSGAEVKKPGASVKVSCKSSGYTFTSYGISWVRQALGQGLEWMGIINPSGGSTSYAQKFQGRVTMTRDTSTSTVYMELSSLRSEDTAVYYCATPYSSGWSLFDYWGQGTLVTVSSA

SEQ ID NO: 8820 - protein, 125 aa, Homo sapiens; identical to SEQ ID NO: 8811
  Heavy chain

SEQ ID NO: 8821 - protein, 117 aa, Homo sapiens
  Heavy chain
QVQLVESGGGVVQPGRSLRLSCAASGFTFSSYGMHWVRQAPGKGLEWVAVISYDGSNKYYADSVKGRFTISRDNSKNTLYLQMNSLRAEDTAVYYCARDNLYFDYWGQGTLVTVSSA

SEQ ID NO: 8822 - protein, 122 aa, Homo sapiens
  Heavy chain
QVQLVQSGAEVKKPGASVKVSCKSSGYTFTSYGISWVRQALGQGLEWMGWISAYNGNTNYAQKLQGRVTMTTDTSTSTAYMELRSLRSDDTAVYYCARGGAAAVSYGMDVWGQGTTVTVSSA

SEQ ID NO: 8823 - protein, 125 aa, Homo sapiens; identical to SEQ ID NO: 8811
  Heavy chain

SEQ ID NO: 8824 - protein, 122 aa, Homo sapiens
  Heavy chain
QVQLVQSGAEVKKPGASVKVSCKSSGYTFTSYGISWVRQALGQGLEWMGWISAYNGNTNYAQKLQGRVTMTTDTSTSTAYMELRSLRSDDTAVYYCATGLTGYYKSWFDPWGQGTLVTVSSA

SEQ ID NO: 8825 - protein, 122 aa, Homo sapiens; identical to SEQ ID NO: 8822
  Heavy chain

SEQ ID NO: 8826 - protein, 125 aa, Homo sapiens; identical to SEQ ID NO: 8811
  Heavy chain

SEQ ID NO: 8827 - protein, 122 aa, Homo sapiens
  Heavy chain
EVQLVESGGGLVQPGGSLRLSCAASGFTFSSYAMSWVRQGPGKGLEWVSGISGSGGNTYYADSVKGRFTISRDNSKNTLYLQMNSPRAEYPAVYYCAKDPRIAVAGTFDYWGQGTLVTVSSA

SEQ ID NO: 8828 - protein, 122 aa, Homo sapiens
  Heavy chain
QVQLVQSGAEVKKPGASVKVSCKASGYTFTSYYMHWVRQALGQGLEWMGWISAYNGNTNYAQKLQGRVTMTTDTSTSTAYMELRSLRSDDTAVYYCAREGGFGELLSFDYWGQGTLVTVSSA

SEQ ID NO: 8829 - protein, 125 aa, Homo sapiens; identical to SEQ ID NO: 8811
  Heavy chain

SEQ ID NO: 8830 - protein, 119 aa, Homo sapiens
  Heavy chain
QVQLVQSGAEVKKPGASVKVSCKSSGYTFTSYGISWVRQALGQGLEWMGWISAYNGNTNYAQKLQGRVTMTEDTSTDTAYMELSSLRSEDTAVYYCATAIGYNGMDVWGQGTTVTVSSA

SEQ ID NO: 8831 - protein, 122 aa, Homo sapiens; identical to SEQ ID NO: 8828
  Heavy chain

SEQ ID NO: 8832 - protein, 122 aa, Homo sapiens; identical to SEQ ID NO: 8828
  Heavy chain

SEQ ID NO: 8833 - protein, 124 aa, Homo sapiens; identical to SEQ ID NO: 8813
  Heavy chain

SEQ ID NO: 8834 - protein, 118 aa, Homo sapiens
  Heavy chain
QVQLVESGGGVVQPGRSLRLSCAASGFTFSNYGMHWVRLAPGKGLEWVAVIWYDGSNKYYTDSVKGRFTISRDNSKNTLYLQMNSLRAEDTAVYYCAGGWNYYGDYWGQGTLVTVSSA

SEQ ID NO: 8835 - protein, 125 aa, Homo sapiens
  Heavy chain
QVQLQESGPGMVKPSETLSLTCTVSGGSINNYYWNWIRQSAGKGLEWIRHIYTSGRTNINPSLKSRFTMSVDTPKNQFSLKLTSVTAADTAVYFCARRFIALTGNDYNYGMEVWGQGTTVTVSSA

SEQ ID NO: 8836 - protein, 118 aa, Homo sapiens
  Heavy chain
QVQLVESGGGVVQPGRSLRLSCAASGFTFSSYGMHWVRQAPGKGLEWVAVIWYDGSNKYYADSVKGRITISRDNSKNTLYLQMNSLRAEDTAVYYCAGGGSYYGDYWGQGTLVTVSSA

SEQ ID NO: 8837 - protein, 118 aa, Homo sapiens
  Heavy chain
QVQLVESGGGVVQPGRSLRLSCVASGFTFSNYGMHWVRQAPGKGLEWVAVIWYDGSNKYYADSVKGRFTISRDNSKNTLYLQMNILRAEDTAVYYCAGGGNYYGDYWGQGTLVTVSSA

SEQ ID NO: 8838 - protein, 126 aa, Homo sapiens
  Heavy chain
QVQLVESGGGVVQPGRSLRLSCAASGFTFSSYGMHWVRQAPGKGLEWVALISYDGSNKYYADSVKGRFTISRDNSKNTLYLQMNSLRAEDTAVYYCARGGYFDPYGDYYYGMDVWGQGTTVTVSSA

SEQ ID NO: 8839 - protein, 118 aa, Homo sapiens
  Heavy chain
QVQLVESGGGVVQPGRSLRLSCAASGFTFSNYGMHWVRQAPGKGLEWVAVIWYDGSNKYYTDSVKGRFTISRDNSKNTLYLQMNSLRAEDTAVYYCAGGGNYYGDYWGQGTLVTVSSA

SEQ ID NO: 8840 - protein, 118 aa, Homo sapiens
  Heavy chain
QVQLVESGGGVVQPGRSLRLSCAASGFTFSNYGMHWVRQAPGKGLEWVAVIWYDGSNKYYTDSVKGRFTISRDNSKNTLYLQMNSLRAEDTAVYYCAGGGNYYSDYWGQGTLVTVSSA

SEQ ID NO: 8841 - protein, 118 aa, Homo sapiens
  Heavy chain
QVQLVESGGGVVQPGRSLRLSCVASGFTFSNYGMHWVRQAPGKGLEWVAVIWYDGSNKYYADSVKGRFTISRDNSKNTLYLQMNILRAEDTAVYYCAGGGDYYGDYWGQGTLVTVSSA

SEQ ID NO: 8842 - protein, 118 aa, Homo sapiens
  Heavy chain
QVQLVESGGGVVQPGRSLRLSCVASGFTFSNYGMPWVRQAPGKGLEWVAVIWYDGSNKYYADSVKGRFTISRDNSKNTLYLQMTILRAEDTAVYYCAGGGNYSGDYWGQGTLVTVSSA

SEQ ID NO: 8843 - protein, 118 aa, Homo sapiens
  Heavy chain
QVQLVESGGGVVQPGRSLRLSCEASGFTFSNYGMHWVRQAPGKGLEWVAVIWYDGSNKYYTDSVKGRFTISRDKSKNTLYLQSNSLRAEDTAVYYCAGGGNYYVDYWGQGTLVTVSSA

SEQ ID NO: 8844 - protein, 119 aa, Homo sapiens
  Heavy chain
QVQLVESGGGVVQPGRSLRLSCAASGFTFSSYGMHWVRQAPGKGLEWVAVIWYDGSIKYYADSVKGRFTISRDNSKNTLYLQMNSLRAEDTAVYYCANDILTGSFDYWGQGTLVTVSSA

SEQ ID NO: 8845 - protein, 121 aa, Homo sapiens
  Heavy chain
EVQLVESGGGLVKPGGSLRLSCAASGFTFSNAWLSWVRQAPGKGLEWVGRIKSKSDGGTTDYAAPAKGEFTISRDDSKNTLFLQMNSLKTEDTAIYYCALHYYGTVFDPWGQGTLVTVSTA

SEQ ID NO: 8846 - protein, 126 aa, Homo sapiens
  Heavy chain
EVQLVESGGGLVQPGGSLRLSCAASGFTFSSYAMSWVRQAPGKGLEWVSAISGSGGSTYYADSVKGRFTISRDNSKNTLYLQMNSLRAEDTAVYYCTKRDYYGSGSWVYYGMDVWGQGTTVTVSSA

SEQ ID NO: 8847 - protein, 124 aa, Homo sapiens
  Heavy chain
QVQLVQSGAEVKKPGASVKVSCKASGYTFTSYGISWVRQAPGQGLEWMGWISAYNGNTNYAQKLQGRVTMTTDTSTSTAYMELRSLRSDDTAVYYCARDQHYYGSGSYYKDYWGQGTLVTVSSA

SEQ ID NO: 8848 - protein, 124 aa, Homo sapiens
  Heavy chain
EVQLVESGGGLVQPGGSLRLSCAASGFTFSSYAMSWVRQAPGKGLEWVSAISGSGGSTYYADSVKGRFTISRDNSKNTLYLQMNSLRAEDTAVYYCAKDSGSYHYYYYGMDVWGQGTTFTVSSA

SEQ ID NO: 8849 - protein, 124 aa, Homo sapiens
  Heavy chain
QVQLVESGGGLVTPGGSLRLSCAASGFTFSDYYMSWIRQSPGKGLEWISSISGGGYTIYYADSVRGRFTISRDNAKNSLFLQMHSLRAEDTAVYYCARDYPTSVTTYWFFDLWGRGTLVTVSSA

SEQ ID NO: 8850 - protein, 118 aa, Homo sapiens
  Heavy chain
QVQLVQSGAEVKKPGASVMVSCKASGYTFTSYDINWVRQATGQGLEWMGWMIPNSGNTGYAQKFQGRVTMTRNTSISTAHMELSSLRSEDTAVYYCARGLTGDFDYWGQGTLVTVSSA

SEQ ID NO: 8851 - protein, 121 aa, Homo sapiens
  Heavy chain
QVQLVESGGGVVQPGRSLRLSCAASGFTFSSYGMHWVRQAPGKGLEWVAVIWYDGSNKYYADSVKGRFTISRDNSKNTLYLQMNSLRAEDTAVYYCARYYDILTGYFVYWGQGTLVTVSSA

SEQ ID NO: 8852 - protein, 125 aa, Homo sapiens
  Heavy chain
QVQLVESGGGVVQPGRSLRLSCAASGFTFSSYGMHWVRQAPGKGLEWVAVIWYDGSNKYYADSVKGRFNSSRDNSKNALYLEMNSLRAEDTAVYYCARGGYSSGWYVLYYFDYWGQGTLVTVASA

SEQ ID NO: 8853 - protein, 125 aa, Homo sapiens
  Heavy chain
QVQLVESGGGVVQPGRSLRLSCAASGFTFSSYGMHWVRQAPGKGLEWVAVIWYDGSNKYYADSVKGRFTISRDNSKNTLYLQMNSLRAEDTAVYYCARVGYSSGWYVLYYFDYWGQGTLVTVSSA

SEQ ID NO: 8854 - protein, 119 aa, Homo sapiens
  Heavy chain
QVQLQESGPGLVKPSETLSLTCTVSGGSISSYYWSWIRQPPGKGLEWIGYIYYSGSTNYNPSLKSRVTISVDTSKNQFSLKLSSVTAADTAVYYCARDPYEGYGMDVWGQGTTVTVSSA

SEQ ID NO: 8855 - protein, 120 aa, Homo sapiens
  Heavy chain
QVQLVESGGGVVQPGRSLRPSCAASGFTFSSYGMHWVRQAPGKGLEWEAVIWYDGSNKYYADSVKGRFTISRDNSKNTLYLQMNSLRAEDTAVYYCVYSGSYLYYFDYWGRGTLVTVSSA

SEQ ID NO: 8856 - protein, 124 aa, Homo sapiens
  Heavy chain
QVQLVESGGGLVTPGGSLRFSCAASGFTFSDYYMSWIRQSPGKGLEWISSISGGGYTIYYADSVKGRFTISRDNAKNSLFLQMHSLRAEDTAVYYCARDCPTSVTTYWFFDLWGRGTLVTVSSA

SEQ ID NO: 8857 - protein, 124 aa, Homo sapiens; identical to SEQ ID NO: 8849
  Heavy chain

SEQ ID NO: 8858 - protein, 124 aa, Homo sapiens
  Heavy chain
QVQLVESGGGLVTPGGSLRLSCAASGFTFSDYYMSWIRQAPGKGLEWISSISGGGYTIYYADSVKGRFTSSRDNAKTSLFMQMHSLRAEDTSCDYCARDYPTSVTTYWYFDLWRRGSLVTVSSA

SEQ ID NO: 8859 - protein, 122 aa, Homo sapiens
  Heavy chain
QVQLQESGPGLVKPSETLSLTCTVSGGSISSYYWSWIRQPPGKGLEWIGYIYYSGSTNYNPSLKSRVTISVDTSKNQFSLKLSSVTAADTAVYYCARRDYYGSGKSYFDLWGRGTLVTVSSA

SEQ ID NO: 8860 - protein, 120 aa, Homo sapiens
  Heavy chain
QVQLVESGGGVVQPGRSLRLSCAASRFTFSNYGMYWVRQAPGKGLQWVAVIAYDGSNEYYADSVKGRFTISRDNSKSTLFLQMNNLRPEDTAVYYCARRSGFGEPPKYWGQGTLVTVSSA

SEQ ID NO: 8861 - protein, 123 aa, Homo sapiens
  Heavy chain
QVQLVQSGTEVKKPGASVKVSCKASGYTFATYGVSWVRQAPGQGLEWMGWISAYSDNTNYAQNLQGRVTLTTDTSTNTAYMELRSLRSDDTAVYFCARDGSHGDYYYGMDVWGQGTTVTVSSA

SEQ ID NO: 8862 - protein, 118 aa, Homo sapiens; identical to SEQ ID NO: 8837
  Heavy chain

SEQ ID NO: 8863 - protein, 123 aa, Homo sapiens; identical to SEQ ID NO: 8861
  Heavy chain

SEQ ID NO: 8864 - protein, 118 aa, Homo sapiens; identical to SEQ ID NO: 8837
  Heavy chain

SEQ ID NO: 8865 - protein, 118 aa, Homo sapiens; identical to SEQ ID NO: 8836
  Heavy chain

SEQ ID NO: 8866 - protein, 118 aa, Homo sapiens
  Heavy chain
QVQLVESGGGEVQPGRSLRLSCAASGFTFSDYGMHWVRQAPGKGLEWVAVIWYDGSNKYYADSVKGRFTISRDNSKNTLYLQMNSLRAEDTAVYYCAGGGSYWGDYWGQGTLVTVSSA

SEQ ID NO: 8867 - protein, 118 aa, Homo sapiens; identical to SEQ ID NO: 8839
  Heavy chain

SEQ ID NO: 8868 - protein, 118 aa, Homo sapiens; identical to SEQ ID NO: 8837
  Heavy chain

SEQ ID NO: 8869 - protein, 118 aa, Homo sapiens; identical to SEQ ID NO: 8866
  Heavy chain

SEQ ID NO: 8870 - protein, 115 aa, Homo sapiens; identical to SEQ ID NO: 109
  Heavy chain

SEQ ID NO: 8871 - protein, 118 aa, Homo sapiens
  Heavy chain
QVQLVQSGAEVKKPGASVKVSCKVSGYTLTELSMHWVRQAPGKGLEWMGGFDPEDGETIYAQKFQGRVTMTEDTSTDTAYMELSSLRSEDTAVYYCATSSGSYWDYWGQGTLVTVSSA

SEQ ID NO: 8872 - protein, 119 aa, Homo sapiens; identical to SEQ ID NO: 8844
  Heavy chain

SEQ ID NO: 8873 - protein, 124 aa, Homo sapiens; identical to SEQ ID NO: 8848
  Heavy chain

SEQ ID NO: 8874 - protein, 117 aa, Homo sapiens
  Heavy chain
QVQLVQSGAEVKKPGASVKVSCKASGYTFTSYYMHWVRQAPGQGLEWMGIINPSGGSTSYAQKFQGRVTMTRDTSTSTVYMELSSLRSEDTAVYYCARGGDIGDYWGQGTLVTVSSA

SEQ ID NO: 8875 - protein, 120 aa, Homo sapiens
  Heavy chain
EVQLVESGGGLVQPGRSLRLSCTASGFTFGDYAMSWFRQAPGKGLEWVGFIRSKAYGGTTEYAASVKGRFTISRDDSKSIAYLQMNSLKTEDTAVYYCTRTAAGHFDYWGQGTLVTVSSA

SEQ ID NO: 8876 - protein, 120 aa, Homo sapiens
  Heavy chain
QVQLVESGGGVVQPGRSLRLSCAASGFTFSSYGMHWVRQAPGKGLEWVAVIWYDGSNKYYADSVKGRFTISRDNSKNTLYLQMNSLRAEDTAVYYCARGSIAAAGTDYWGQGTLVTVSSA

SEQ ID NO: 8877 - protein, 118 aa, Homo sapiens; identical to SEQ ID NO: 8839
  Heavy chain

SEQ ID NO: 8878 - protein, 118 aa, Homo sapiens; identical to SEQ ID NO: 8837
  Heavy chain

SEQ ID NO: 8879 - protein, 118 aa, Homo sapiens; identical to SEQ ID NO: 8837
  Heavy chain

SEQ ID NO: 8880 - protein, 118 aa, Homo sapiens; identical to SEQ ID NO: 8837
  Heavy chain

SEQ ID NO: 8881 - protein, 118 aa, Homo sapiens; identical to SEQ ID NO: 8837
  Heavy chain

SEQ ID NO: 8882 - protein, 118 aa, Homo sapiens; identical to SEQ ID NO: 8837
  Heavy chain

SEQ ID NO: 8883 - protein, 118 aa, Homo sapiens; identical to SEQ ID NO: 8837
  Heavy chain

SEQ ID NO: 8884 - protein, 118 aa, Homo sapiens; identical to SEQ ID NO: 8836
  Heavy chain

SEQ ID NO: 8885 - protein, 118 aa, Homo sapiens; identical to SEQ ID NO: 8837
  Heavy chain

SEQ ID NO: 8886 - protein, 118 aa, Homo sapiens; identical to SEQ ID NO: 8837
  Heavy chain

SEQ ID NO: 8887 - protein, 118 aa, Homo sapiens; identical to SEQ ID NO: 8837
  Heavy chain

SEQ ID NO: 8888 - protein, 118 aa, Homo sapiens; identical to SEQ ID NO: 8837
  Heavy chain

SEQ ID NO: 8889 - protein, 118 aa, Homo sapiens; identical to SEQ ID NO: 8836
  Heavy chain

SEQ ID NO: 8890 - protein, 118 aa, Homo sapiens; identical to SEQ ID NO: 8837
  Heavy chain

SEQ ID NO: 8891 - protein, 118 aa, Homo sapiens
  Heavy chain
QVQLVESGGGVVQPGRSLRLSCVASGFTFSNYGMHWVRQAPGKGLEWVAVIWYDGSNKYYADSVKGRFPISRDNSKKTLYLEMNILRAEDTAVYYGAGGGNYDGDYWGQGTLVTVSSA

SEQ ID NO: 8892 - protein, 118 aa, Homo sapiens
  Heavy chain
QVQLVESGGGVVQPGRSLRLSCVASGFTFSNYGMHWVRQAPGKGLEWVAVIWYDGSNKYYADSVKGRFTISRDNSKNTLYLQMNILRAEDTAVYYCAGGGNYNGDYWGQGTLVTVSSA

SEQ ID NO: 8893 - protein, 118 aa, Homo sapiens
  Heavy chain
QVQLVESGGGVVQPGRSLRLSCAASGFTFSSYGMHWVRQAPGKGLEWVAVIWYDGSNKYYTDSMKGRFTISRDNSKNTLYLQMNSLRAEDTAVYYCAGGGNYYGDDWGQGTLVTVSSA

SEQ ID NO: 8894 - protein, 118 aa, Homo sapiens
  Heavy chain
QVQLVESGGGVVQPGRSLRLSCAASGFTFSSYGMHWVRQAPGKGLEWVAVIWYDGSNKYYADSVKGRFTISRDNSKNTLYLQMNSLRAEDTAVYYCAGGANYWGDFWGQGTLVTVSSA

SEQ ID NO: 8895 - protein, 118 aa, Homo sapiens
  Heavy chain
QVQLVESGGGVVQPGRSLRLSCAASGFTFSSYGMHWVRQAPGKGLEWVAVIWYDGSNKYYADSVKGRFTISRDNSKNTLYLQMNSLRAEDTAVYYCAGGGNYCGDFWGQGTLVTVSSA

SEQ ID NO: 8896 - protein, 118 aa, Homo sapiens
  Heavy chain
QVQLVESGGGVVQPGRSLRLSCAASGFTFSSYGMHWVRQAPGKGLEWVAVIWYDGSNKYYADSVKGRFTISRDNSKNTLYLQMNSLRAEDTAVYYCAGGGNYGGDFWGQGTLVTVSSA

SEQ ID NO: 8897 - protein, 118 aa, Homo sapiens
  Heavy chain
QVQLVESGGGVVQPGRSLRLSCAASGFTFSSYGMHWVRQAPGKGLEWVAVIWYDGSNKYYADSVKGRFTISRDNSKNTLYLQMNSLRAEDTAVYYCAGGGNYWEDFWGRGTLVTVSSA

SEQ ID NO: 8898 - protein, 118 aa, Homo sapiens
  Heavy chain
QVQLVESGGGVVQPGRSLRLSCAASGFTFSSYGMHWVRQAPGKGLEWVAVIWYDGSNKYYADSVKGRFTISRDKSKSTLYLEMNSLRAEDTAVYYCAGGGNYWGDCWGQGSLVAVSSA

SEQ ID NO: 8899 - protein, 118 aa, Homo sapiens
  Heavy chain
QVQLVESGGGVVQPGRSLRLSCAASGFTFSSYGMHWVRQAPGKGLEWVAVIWYDGSNKYYADSVKGRFTISRDNSKNTLYLQMNSLRAEDTAVYYCAGGGNYWGDFWGQGTLVTVSSA

SEQ ID NO: 8900 - protein, 118 aa, Homo sapiens
  Heavy chain
QVQLVESGGGVVQPGRSLRLSCAASGFTFSSYGMHWVRQAPGKGLEWVAVIWYDGSNKYYADSVKGRVTISRDNSKNTLYLEMNSLRAEDTAVYYCAGGGNYWGDVWGQGTLVTVASA

SEQ ID NO: 8901 - protein, 118 aa, Homo sapiens
  Heavy chain
QVQLVESGGGVVQPGRSLRLSCAASGFTFSSYGMHWVRQAPGKGLEWVAVIWYDGSNKYYADSVKGRVTSSRDNAKRTLYREMSSLRAEDTAVYYCAGGGNYWGDYWGQGTLVTVSSG

SEQ ID NO: 8902 - protein, 118 aa, Homo sapiens
  Heavy chain
QVQLVESGGGVVQPGRSLRLSCAASGFTFSSYGMHWVRQAPGKGLEWVAVIWYDGSNKYYADSVKGRFTISRDNSKNTLYLQMNSLRAEDTAVYYCAGGGNYWRDFWGQGTLVTVSSA

SEQ ID NO: 8903 - protein, 118 aa, Homo sapiens
  Heavy chain
QVQLVESGGGVVQPGRSLRLSCAASGFTFSSYGMHWVRQAPGKGLEWVAVIWYDGSNKYYADSVKGRFTISRDNSKNTLYLQMNSLRAEDTAVYYCAGGVNYWGDFWGQGTLVTVSSA

SEQ ID NO: 8904 - protein, 118 aa, Homo sapiens
  Heavy chain
QVQLVESGGGVVQPGRSLRLSCAASGFTFSSYGMHWVRQAPGKGLEWVAVIWYDGGNKYYADSVKGRFTISRDNSKNTLYLQMNSLRAEDTAVYCCAGGWNYWGDFWGQGTLVTVSSA

SEQ ID NO: 8905 - protein, 118 aa, Homo sapiens
  Heavy chain
QVQLVESGGGVVQPGRSLRLSCAASGFTFSSYGMHWVRQAPGKGLEWVAVIWYDGSNKYYADSVKGRFTISRDKSKNTLYLQMKSLRAEDTAVYYCAVGGNYWGDFWGQGTLVTVSSA

SEQ ID NO: 8906 - protein, 120 aa, Homo sapiens
  Heavy chain
QVQLVESGGGVVQPGRSLRLSCAASGFTFSSYGMHWVRQAPGKGLEWVAVIWYDGSNKYYADSVKGRFTISRDNSKNTLYLQMNSLRAEDTAVYYCVYSGSYLYCFDYWGQGTLVTVSSA

SEQ ID NO: 8907 - protein, 120 aa, Homo sapiens
  Heavy chain
QVQLVQSGAEVKKPGASVKVSCKVSGYTLTELSMHWVRQAPGKGLEWMGGFDPEDGETIYAQKFQGRVTMTEDTSTDTAYMELSSLRSEDTAVYYCATPEGYVVAFDIWGQGTMVTVSSA

SEQ ID NO: 8908 - protein, 118 aa, Homo sapiens; identical to SEQ ID NO: 8837
  Heavy chain

SEQ ID NO: 8909 - protein, 118 aa, Homo sapiens; identical to SEQ ID NO: 8836
  Heavy chain

SEQ ID NO: 8910 - protein, 118 aa, Homo sapiens; identical to SEQ ID NO: 8837
  Heavy chain

SEQ ID NO: 8911 - protein, 118 aa, Homo sapiens; identical to SEQ ID NO: 8866
  Heavy chain

SEQ ID NO: 8912 - protein, 118 aa, Homo sapiens; identical to SEQ ID NO: 8866
  Heavy chain

SEQ ID NO: 8913 - protein, 118 aa, Homo sapiens; identical to SEQ ID NO: 8866
  Heavy chain

SEQ ID NO: 8914 - protein, 118 aa, Homo sapiens; identical to SEQ ID NO: 8866
  Heavy chain

SEQ ID NO: 8915 - protein, 118 aa, Homo sapiens; identical to SEQ ID NO: 8866
  Heavy chain

SEQ ID NO: 8916 - protein, 118 aa, Homo sapiens; identical to SEQ ID NO: 8866
  Heavy chain

SEQ ID NO: 8917 - protein, 118 aa, Homo sapiens; identical to SEQ ID NO: 8866
  Heavy chain

SEQ ID NO: 8918 - protein, 118 aa, Homo sapiens; identical to SEQ ID NO: 8866
  Heavy chain

SEQ ID NO: 8919 - protein, 132 aa, Homo sapiens
  Heavy chain
QVQLVESGGGVVQPGRSLRLSCAASGFTFSNYGTHWVRQAPGKGLEWVAVIWYDGSNKYYADSVKGRFTISRDNSKNTLYLQMNSLRAEDTAVYYCARDRIYCSSTRCIGFGYYYYGMDVWGQGTTVTVSSA

SEQ ID NO: 8920 - protein, 118 aa, Homo sapiens; identical to SEQ ID NO: 8866
  Heavy chain

SEQ ID NO: 8921 - protein, 118 aa, Homo sapiens; identical to SEQ ID NO: 8837
  Heavy chain

SEQ ID NO: 8922 - protein, 118 aa, Homo sapiens; identical to SEQ ID NO: 8836
  Heavy chain

SEQ ID NO: 8923 - protein, 118 aa, Homo sapiens; identical to SEQ ID NO: 8866
  Heavy chain

SEQ ID NO: 8924 - protein, 118 aa, Homo sapiens; identical to SEQ ID NO: 8837
  Heavy chain

SEQ ID NO: 8925 - protein, 118 aa, Homo sapiens; identical to SEQ ID NO: 8837
  Heavy chain

SEQ ID NO: 8926 - protein, 118 aa, Homo sapiens; identical to SEQ ID NO: 8837
  Heavy chain

SEQ ID NO: 8927 - protein, 118 aa, Homo sapiens; identical to SEQ ID NO: 8837
  Heavy chain

SEQ ID NO: 8928 - protein, 118 aa, Homo sapiens; identical to SEQ ID NO: 8837
  Heavy chain

SEQ ID NO: 8929 - protein, 118 aa, Homo sapiens; identical to SEQ ID NO: 8837
  Heavy chain

SEQ ID NO: 8930 - protein, 118 aa, Homo sapiens; identical to SEQ ID NO: 8837
  Heavy chain

SEQ ID NO: 8931 - protein, 118 aa, Homo sapiens; identical to SEQ ID NO: 8839
  Heavy chain

SEQ ID NO: 8932 - protein, 118 aa, Homo sapiens; identical to SEQ ID NO: 8837
  Heavy chain

SEQ ID NO: 8933 - protein, 118 aa, Homo sapiens; identical to SEQ ID NO: 8839
  Heavy chain

SEQ ID NO: 8934 - protein, 118 aa, Homo sapiens; identical to SEQ ID NO: 8837
  Heavy chain

SEQ ID NO: 8935 - protein, 118 aa, Homo sapiens; identical to SEQ ID NO: 8839
  Heavy chain

SEQ ID NO: 8936 - protein, 118 aa, Homo sapiens; identical to SEQ ID NO: 8839
  Heavy chain

SEQ ID NO: 8937 - protein, 118 aa, Homo sapiens
  Heavy chain
QVQLVESGGGVVQPGRSLRLSCAASGFTFSNYGMHWVRQAPGKGLEWVAVIWYDGSNKYYTDSVKGRFTTSRDNSKNTLYLQMNSLRAEDTAVYYCAGAGNYYGDYWGQGTLVTVSSA

SEQ ID NO: 8938 - protein, 118 aa, Homo sapiens
  Heavy chain
QVQLVESGGGVVQPGRSLRLSCAASGFTFSNYGMHWVRQAPGKGLEWVAVIWYDGSNKYYTDSVKGRFTISRDNSKNTLYLQMNSLRAEDTAVYYCAGCGNYYGDYWGQGTLVTVSSA

SEQ ID NO: 8939 - protein, 118 aa, Homo sapiens
  Heavy chain
QVQLVESGGGVVQPGRSLRLSCAASGFTFSNYGMHWVRQAPGKGLEWVAVIWYDGSNKYYTDSVKGQFTISRDNSKNTLYLQMNSLRAEDTAVYYCAGGENYYGDYWGQGTLVTVSSA

SEQ ID NO: 8940 - protein, 118 aa, Homo sapiens
  Heavy chain
QVQLVESGGGVVQPGRSLRLSCAASGFTFSNYGMHWVRQAPGKGLEWVAVIWYDGSNKYYTDSVKGRFTISRDNSKNTLYLQMNSLRAEDTAVYYCAGGGDYYGDYWGQGTLVTVSSA

SEQ ID NO: 8941 - protein, 118 aa, Homo sapiens
  Heavy chain
QVQLVESGGGVVQPGRSLRLSCAASGFTFSNYGMHWVRQAPGKGLEWMAVIWYDGSNKYYTDSVKGRVTISRDNSKNTMYLQMNSLRAEDTAVYYCAGGGNDYGDYWGQGTLVIVSSA

SEQ ID NO: 8942 - protein, 118 aa, Homo sapiens
  Heavy chain
QVQLVESGGGVVQPGRSLRLSCAASGFTFSNYGMHWVRQAPGKGLEWVAVIWYDGSNKYYTDSVKGRFTISRDNSKNTLYLQMNSLRAEDTAVYYCAGGGNYCGDYWGQGTLVTVSSA

SEQ ID NO: 8943 - protein, 118 aa, Homo sapiens
  Heavy chain
QVQLVESGGGVDQPGRSLRLSCAASGFTFSNYGMHWVRQAPGKGLEWVEVIWYDGSNKYYTDSVKGRVTISRDNSKNTLYLQMNSLRAEDTAVYYCAGGGNYDGDYWGQGTLVTVSSA

SEQ ID NO: 8944 - protein, 118 aa, Homo sapiens
  Heavy chain
QVQLVESGGGVVQPGRSLRLSCAASGFTFSNYGMHWVRQAPGKGLEWVVVIWYDGSNKYYTDSVKGRFTISRDNSKNTLYLQMNSLSAEHTAVYYFAGGGNYSGDYWGQGTLVTVSSA

SEQ ID NO: 8945 - protein, 118 aa, Homo sapiens
  Heavy chain
QVQLVESGGGVVQPGRSLRLSCAASGFTFSNYGMHWVRQAPGKGLEWVAVIWYDGSNKYYTDSVKGRITISRDNSKNTLYLQMNSLRAEDTAVYYCAGGGNYYCDYWCQGTLVTVSSA

SEQ ID NO: 8946 - protein, 118 aa, Homo sapiens
  Heavy chain
QVQLVESGGGVVQPGRSLRLSCAASGFTFSNYGMHWVRQAPGKGLEWVAVIWYDGSNKYYTDSVKGRFTISRDNSKNTLYLQMNSLRAEDTAVYYCAGGGNYYDDYWGQGTLVTVSSA

SEQ ID NO: 8947 - protein, 118 aa, Homo sapiens
  Heavy chain
QVQLVESGGGVVQPGRSLRLSCAASGFTFSNYGMHWVRQAPGKGLEWVAVIWYDGSNKYYTDSVKGRFTISRDNSKNTLYLQMNSLRAEDTAVYYCAGGGNYYGAYWGQGTLVTVSSA

SEQ ID NO: 8948 - protein, 118 aa, Homo sapiens
  Heavy chain
QVQLVESGGGVVQPGRSLRLSCAASGFTFSNYGMHWVRQAPGKGLEWVAVIWYDGSNKYYTDSVRGRFTISRDNSKNTLYLQMNSLRAEDTAVYYCAGGGNYYGDFWGQGTLVTVSSA

SEQ ID NO: 8949 - protein, 118 aa, Homo sapiens; identical to SEQ ID NO: 8836
  Heavy chain

SEQ ID NO: 8950 - protein, 118 aa, Homo sapiens
  Heavy chain
QVQLVESGGGVVQPGRSLRLSCAASGFTFSNYGMHWVRQAPGKGLEWVAVIWYDGSNKYYTDSVKGRFTISRDNSKNTLYLQMNSLRAEDTAVYYCAGGGTYYGDYWGQGTLVSVSSA

SEQ ID NO: 8951 - protein, 118 aa, Homo sapiens
  Heavy chain
QVQLVESGGGVVQPGRSLRLSCAASGFTFSNYGMHWVRQAPGKGLEWVAVIWYDGSNKYYTDSVKGRFPISRDNSKNTLYLQMNSLRAEDTAVYYCAGGVNYYGDYWGQGTLVTVSSA

SEQ ID NO: 8952 - protein, 118 aa, Homo sapiens
  Heavy chain
QVQLVESGGGVVQPGRSLRLSCAASGFTFSNYGMHWVRQAPGKGLEWVAVIWYDGSNKYYTDSVKGRFTISRDNSKNTLYLQMNSLRAEDTAVYYCAGGWNYYGDYWGQGTLVTVSSA

SEQ ID NO: 8953 - protein, 118 aa, Homo sapiens
  Heavy chain
QVQLVESGGGVVQPGGSLRLSCAASGFTFSNYGMHWVRQAPGKGLEWVAVIWYDGSNKYYTDSVKGRFTISRDNSKNTLYLQMNSLRAEDTAVYYCSGGGNYYGDYWGQGTLVTVSSA

SEQ ID NO: 8954 - protein, 118 aa, Homo sapiens; identical to SEQ ID NO: 8839
  Heavy chain

SEQ ID NO: 8955 - protein, 123 aa, Homo sapiens; identical to SEQ ID NO: 8861
  Heavy chain

SEQ ID NO: 8956 - protein, 118 aa, Homo sapiens; identical to SEQ ID NO: 8837
  Heavy chain

SEQ ID NO: 8957 - protein, 118 aa, Homo sapiens; identical to SEQ ID NO: 8837
  Heavy chain

SEQ ID NO: 8958 - protein, 123 aa, Homo sapiens; identical to SEQ ID NO: 8861
  Heavy chain

SEQ ID NO: 8959 - protein, 119 aa, Homo sapiens; identical to SEQ ID NO: 8844
  Heavy chain

SEQ ID NO: 8960 - protein, 123 aa, Homo sapiens; identical to SEQ ID NO: 8861
  Heavy chain

SEQ ID NO: 8961 - protein, 121 aa, Homo sapiens
  Heavy chain
QVQLVESGGGVVQPGRSLRLSCAASGFSFSLYGMHWVRQAPGKGLEWVAIIWYDGSKKYCADSVKGRFTISRDNSNSTLYLQMNSLRVEDTAVYYCARGYYGSGGMRDYWGQGTLVTVSTA

SEQ ID NO: 8962 - protein, 132 aa, Homo sapiens; identical to SEQ ID NO: 8919
  Heavy chain

SEQ ID NO: 8963 - protein, 123 aa, Homo sapiens; identical to SEQ ID NO: 8861
  Heavy chain

SEQ ID NO: 8964 - protein, 123 aa, Homo sapiens; identical to SEQ ID NO: 8861
  Heavy chain

SEQ ID NO: 8965 - protein, 119 aa, Homo sapiens; identical to SEQ ID NO: 8854
  Heavy chain

SEQ ID NO: 8966 - protein, 116 aa, Homo sapiens
  Heavy chain
QVQLVESGGGVVQPGRSLRLSCVASGFTFSNYGMHWVRQAPGKGLEWVAVIWYDGSNKYYADSVKGRFIISRDNSKNTLYLQMNSLRAEDTAVYYCARGGGFDYWGQGTLVTVSSA

SEQ ID NO: 8967 - protein, 124 aa, Homo sapiens
  Heavy chain
QLQLQESGPGLVKPSETLSLTCTVSGGSISSSSYYWGWIRQPPGKGLEWIGSIYYSGSTYYNPSLKSRVTISVDTSKNQFPLKLSSVTAADTAVYYCARVLLWFGELWYFDLWGRGTLVTVSSA

SEQ ID NO: 8968 - protein, 132 aa, Homo sapiens
  Heavy chain
QVQLVESGGGVVQPGRSLRLSCAASGFTFSSYGIHWVRQAPGKGLEWVAVTWYDGGNKYYGDSVKGRFTISRDNSKNTLYLQMNSLRAEDTAVYYCARDRIYCSSSKCIGFGYYFYGLDVWGQGTTVTVSSA

SEQ ID NO: 8969 - protein, 132 aa, Homo sapiens; identical to SEQ ID NO: 8919
  Heavy chain

SEQ ID NO: 8970 - protein, 132 aa, Homo sapiens; identical to SEQ ID NO: 8919
  Heavy chain

SEQ ID NO: 8971 - protein, 132 aa, Homo sapiens; identical to SEQ ID NO: 8919
  Heavy chain

SEQ ID NO: 8972 - protein, 120 aa, Homo sapiens; identical to SEQ ID NO: 8855
  Heavy chain

SEQ ID NO: 8973 - protein, 132 aa, Homo sapiens; identical to SEQ ID NO: 8919
  Heavy chain

SEQ ID NO: 8974 - protein, 132 aa, Homo sapiens; identical to SEQ ID NO: 8919
  Heavy chain

SEQ ID NO: 8975 - protein, 132 aa, Homo sapiens; identical to SEQ ID NO: 8919
  Heavy chain

SEQ ID NO: 8976 - protein, 118 aa, Homo sapiens; identical to SEQ ID NO: 8866
  Heavy chain

SEQ ID NO: 8977 - protein, 132 aa, Homo sapiens
  Heavy chain
QVQLVESGGGVVQPGRSLRLSCAASGFTFSNYGTHWVRQAPGKGLEWVAVIWYDGSNKYYADSVKGRFTISRDNSKNTLYLQMNSLRAEDTAVYYCARDRIDCSSTRCIGFGYYYYGMDVWGQGTTVTVSSA

SEQ ID NO: 8978 - protein, 132 aa, Homo sapiens
  Heavy chain
QVQLVESGGGVVQPGRSLRLSCAASGFTFSNYGTHWVRQAPGKGLEWVAVIWYDGSNKYYADSVKGRFTISRDNSKNTLYLQMNSLRAEDTAVYYCARDRIYCSSARCIGFGYYYYGMDVWGQGTTVTVSSA

SEQ ID NO: 8979 - protein, 132 aa, Homo sapiens
  Heavy chain
QVQLVESGGGVVQPGRSLRLSCAASGFTFSNYGTHWVRQAPGKGLEWVAVIWYDGSNKYYADSVKGRFTISRDNSKNTLYLQMNSLRAEDTAVYYCARDRIYCSSSRCIGFGYYYYGMDVWGQGTTVTVSSA

SEQ ID NO: 8980 - protein, 132 aa, Homo sapiens; identical to SEQ ID NO: 8919
  Heavy chain

SEQ ID NO: 8981 - protein, 132 aa, Homo sapiens
  Heavy chain
QVQLVESGGGVVQPGRSLRLSCAASGFTFSNYGTHWVRQAPGKGLEWVAVIWYDGSNKYYADSVKGRFTISRDNSKNTLYLQMNSLRAEDTAVYYCARDRIYCSSTRCVGFGYYYYGMDVWGQGTTVTVSSA

SEQ ID NO: 8982 - protein, 132 aa, Homo sapiens
  Heavy chain
QVQLVESGGGVVQPGRSLRLSCAASGFTFSNYGTHWVRQAPGKGLEWVAVIWYDGSNKYYADSVKGRFTISRDNSKNTLYLQMNSLRAEDTAVYYCARDRIYWSSTRCIGFGYYYYGMDVWGQGTTVTVSSA

SEQ ID NO: 8983 - protein, 132 aa, Homo sapiens
  Heavy chain
QVQLVESGGGVVQPGRSLRLSCAASGFTFSNYGTHWVRQAPGKGLEWVAVIWYDGSNKYYADSVKGRITIARDNSKNTLYLQMNSLRAEDTAVYYCARDRRYCSSTRCIGFGYYYYGMDVWGQGTLVTVSSA

SEQ ID NO: 8984 - protein, 132 aa, Homo sapiens; identical to SEQ ID NO: 8919
  Heavy chain

SEQ ID NO: 8985 - protein, 132 aa, Homo sapiens; identical to SEQ ID NO: 8919
  Heavy chain

SEQ ID NO: 8986 - protein, 123 aa, Homo sapiens; identical to SEQ ID NO: 8861
  Heavy chain

SEQ ID NO: 8987 - protein, 123 aa, Homo sapiens; identical to SEQ ID NO: 111
  Heavy chain

SEQ ID NO: 8988 - protein, 122 aa, Homo sapiens
  Heavy chain
QLQLQESGPGLVKPSETLSLTCTVSGGSISSSSYYWGWIRQPPGKGLEWIGSIYYSGSTYYNPSLKSRVTISVDTSKNQFSWKLSSVTAADTAVYYCASVLLWFGELFDYWGQGTLVTVSSA

SEQ ID NO: 8989 - protein, 123 aa, Homo sapiens; identical to SEQ ID NO: 8861
  Heavy chain

SEQ ID NO: 8990 - protein, 123 aa, Homo sapiens
  Heavy chain
EVQLLESGGGLVQPGGSLRLSCAASGFTFSSYAMSWVRQAPGKGLEWVSAISGSGNSTYHADSVKGRFTISRDNSKNTLYLKMKSLRAEDTAVYYCAKEMMTVTGKGYFDYWGQGTLVTVSSA

SEQ ID NO: 8991 - protein, 124 aa, Homo sapiens
  Heavy chain
QVQLQESGPGLVKPSETLSLTCTVSGGSISSYYWNWIRLSPGKGLEWIGYIHDRGSTSSLPSLKSRLTISVDTSKSQFSLKLSSVTAADTAVYYCARGDYDFLTGYYNEIDYWGQGTLVTVSSA

SEQ ID NO: 8992 - protein, 122 aa, Homo sapiens
  Heavy chain
QVQLVESGGGVVQPGRSLRLSCAASGFTFRSYGMHWVRQAPGKGLEWVAVIWYDGSNKYYADSVKGRFTISRDNSKNTLYLQMNSLRAEDTAVYYCASDILTGYYTGLDVWGQGTTVTVSSA

SEQ ID NO: 8993 - protein, 122 aa, Homo sapiens
  Heavy chain
QVQLVQSAEVKKPGASVKVSCKASGYTFTSYGISWVRQAPGQGLEWMGWISAYSGNTNYAQKLQDRVTMTTDTSTTTAYMELRSLRSDDTAVYYCARDGSHGDYYYGMDVWGQGTTVTVSSA

SEQ ID NO: 8994 - protein, 123 aa, Homo sapiens; identical to SEQ ID NO: 8861
  Heavy chain

SEQ ID NO: 8995 - protein, 119 aa, Homo sapiens; identical to SEQ ID NO: 8844
  Heavy chain

SEQ ID NO: 8996 - protein, 119 aa, Homo sapiens; identical to SEQ ID NO: 8844
  Heavy chain

SEQ ID NO: 8997 - protein, 119 aa, Homo sapiens; identical to SEQ ID NO: 8844
  Heavy chain

SEQ ID NO: 8998 - protein, 119 aa, Homo sapiens; identical to SEQ ID NO: 8844
  Heavy chain

SEQ ID NO: 8999 - protein, 119 aa, Homo sapiens; identical to SEQ ID NO: 8844
  Heavy chain

SEQ ID NO: 9000 - protein, 119 aa, Homo sapiens; identical to SEQ ID NO: 8844
  Heavy chain

SEQ ID NO: 9001 - protein, 119 aa, Homo sapiens; identical to SEQ ID NO: 8844
  Heavy chain

SEQ ID NO: 9002 - protein, 119 aa, Homo sapiens; identical to SEQ ID NO: 8844
  Heavy chain

SEQ ID NO: 9003 - protein, 119 aa, Homo sapiens
  Heavy chain
QVQLVESGGGVVQPGRSLRLSCAASGFTFSSYGMHWVRQAPGKGLEWVAVIWYDGSIKYYADSVKGRFTISRDNSKNTLYLQMNILSAEDAAVYYCAIDILTGSFDYWGQGTLVTVSSA

SEQ ID NO: 9004 - protein, 119 aa, Homo sapiens; identical to SEQ ID NO: 8844
  Heavy chain

SEQ ID NO: 9005 - protein, 123 aa, Homo sapiens; identical to SEQ ID NO: 8861
  Heavy chain

SEQ ID NO: 9006 - protein, 119 aa, Homo sapiens; identical to SEQ ID NO: 8844
  Heavy chain

SEQ ID NO: 9007 - protein, 123 aa, Homo sapiens; identical to SEQ ID NO: 8861
  Heavy chain

SEQ ID NO: 9008 - protein, 122 aa, Homo sapiens
  Heavy chain
QVQLVESGGGVVQPGRSLRLSCVASGFTFSSYGMHWVRQAPGKGLEWVAVIWYDGSNKYYADSVKGRFTISRDNSKNTLYLQMNSLRAEDTAVYYRARGGSGSSYWYFDLWGRGTLVTVSSA

SEQ ID NO: 9009 - protein, 124 aa, Homo sapiens
  Heavy chain
QVQLVQSGAEVKKPGASVKVSCKASGYTFTSYGISWVRQAPGQGLEWMGWISAYNGNTNYAQKLQGRVTMTTDTSTSTAYMELRSLRSDDTAVYYCARDQYYYDSGSYYKDYWGQGTLVTVSSA

SEQ ID NO: 9010 - protein, 123 aa, Homo sapiens; identical to SEQ ID NO: 8861
  Heavy chain

SEQ ID NO: 9011 - protein, 124 aa, Homo sapiens; identical to SEQ ID NO: 8849
  Heavy chain

SEQ ID NO: 9012 - protein, 123 aa, Homo sapiens; identical to SEQ ID NO: 8861
  Heavy chain

SEQ ID NO: 9013 - protein, 123 aa, Homo sapiens
  Heavy chain
QVQLVQSGAEVKKPGASVKVSCKASGFTFSNYGISWVRQAPGQGLEWMGWVSAYSGNTNNAQKFQGRVTMTTDTSTSIAYMELRSLRSDDTAVYYCARDGAVADYYYGMDVWGQGTTVTVSSA

SEQ ID NO: 9014 - protein, 123 aa, Homo sapiens; identical to SEQ ID NO: 9013
  Heavy chain

SEQ ID NO: 9015 - protein, 123 aa, Homo sapiens
  Heavy chain
QVQLVQSGAEVKKPGASVKVSCKASGYTFATYGVSWVRQAPGQGLEWMGWISAYSDNINYAQNLQGRVTITTDTSTSTAYMELRSLRSDDTAVYYCARDGSHGDYYYGMDVWGQGTTVTVSSA

SEQ ID NO: 9016 - protein, 123 aa, Homo sapiens; identical to SEQ ID NO: 113
  Heavy chain

SEQ ID NO: 9017 - protein, 123 aa, Homo sapiens; identical to SEQ ID NO: 110
  Heavy chain

SEQ ID NO: 9018 - protein, 123 aa, Homo sapiens; identical to SEQ ID NO: 9015
  Heavy chain

SEQ ID NO: 9019 - protein, 123 aa, Homo sapiens; identical to SEQ ID NO: 8861
  Heavy chain

SEQ ID NO: 9020 - protein, 123 aa, Homo sapiens; identical to SEQ ID NO: 8861
  Heavy chain

SEQ ID NO: 9021 - protein, 123 aa, Homo sapiens; identical to SEQ ID NO: 8861
  Heavy chain

SEQ ID NO: 9022 - protein, 123 aa, Homo sapiens; identical to SEQ ID NO: 8861
  Heavy chain

SEQ ID NO: 9023 - protein, 123 aa, Homo sapiens; identical to SEQ ID NO: 8861
  Heavy chain

SEQ ID NO: 9024 - protein, 125 aa, Homo sapiens
  Heavy chain
EVQLVESGGGVVRPGGSLRLSCAASGFTFHDYGMSWVRQAPGKGLEWVSGINGNGGVIGYIDSVKDRFTISRDNAKNSLYLQMNSLSAEDTAVYFCARDDDVLTGYYEWYFDLWGRGTQVTVSSA

SEQ ID NO: 9025 - protein, 123 aa, Homo sapiens; identical to SEQ ID NO: 8861
  Heavy chain

SEQ ID NO: 9026 - protein, 126 aa, Homo sapiens; identical to SEQ ID NO: 8846
  Heavy chain

SEQ ID NO: 9027 - protein, 123 aa, Homo sapiens; identical to SEQ ID NO: 8861
  Heavy chain

SEQ ID NO: 9028 - protein, 123 aa, Homo sapiens; identical to SEQ ID NO: 8861
  Heavy chain

SEQ ID NO: 9029 - protein, 123 aa, Homo sapiens; identical to SEQ ID NO: 8861
  Heavy chain

SEQ ID NO: 9030 - protein, 118 aa, Homo sapiens; identical to SEQ ID NO: 8899
  Heavy chain

SEQ ID NO: 9031 - protein, 119 aa, Homo sapiens; identical to SEQ ID NO: 8844
  Heavy chain

SEQ ID NO: 9032 - protein, 119 aa, Homo sapiens
  Heavy chain
QVQLQESGPGLVKPSETLSLTCTVSGGSISSYYWSWIWQPPGKGLEWIGYTYYSGSTNYNPSLKSRVTISVDTSKNQFSLKLSSVTAADTAVYYCARDELFYWYFDLWGRGTLVTVSSA

SEQ ID NO: 9033 - protein, 123 aa, Homo sapiens
  Heavy chain
QVQLVQSGAEVKKPGASVKVSCKASGYTFATYGVSWVRQAPGQGLEWMGWISAYSDNTNYAQNLQGSVTLTTYTSTNTAYMELRSLRSDDTAVYFCARDGSHGAYYYGMDVWGQGTTVTVSSA

SEQ ID NO: 9034 - protein, 123 aa, Homo sapiens
  Heavy chain
QVQLVQSGTEVKKPGASVKVSCKASGYTFATYGVSWVRQAPGQGLEWMGWISAYSDNTNYAQNLQGRVTLTTDTSTNTAYMELRSLRSDDTAVYFCARDGSHGDDYYGMDVWGQGTTVTVSSA

SEQ ID NO: 9035 - protein, 123 aa, Homo sapiens
  Heavy chain
QVQLVQSGTEVKKPGASVKVSCKASGYTFATYGVSWVRQAPGQGLEWMGWISAYSDNTNYAQNLQGRVTLTTDTSTNTAYMELRSLRSDDAAVDFCARDGSHGDYYDGMDVWGQGTTVTVSSA

SEQ ID NO: 9036 - protein, 123 aa, Homo sapiens; identical to SEQ ID NO: 8861
  Heavy chain

SEQ ID NO: 9037 - protein, 123 aa, Homo sapiens
  Heavy chain
QVQLVQSGTGVEKPGASVKVSCKASGYTFATYGCSWVRQAPGQGLEWMGWISAYSDNTNYAQNLQGRVTLTTDTSTNTDYMEMRRLRSDDTAVYFWASDGSHGDYYYGMDVWGQGTTVTVSSA

SEQ ID NO: 9038 - protein, 122 aa, Homo sapiens; identical to SEQ ID NO: 8992
  Heavy chain

SEQ ID NO: 9039 - protein, 123 aa, Homo sapiens; identical to SEQ ID NO: 110
  Heavy chain

SEQ ID NO: 9040 - protein, 123 aa, Homo sapiens; identical to SEQ ID NO: 8861
  Heavy chain

SEQ ID NO: 9041 - protein, 123 aa, Homo sapiens; identical to SEQ ID NO: 8861
  Heavy chain

SEQ ID NO: 9042 - protein, 123 aa, Homo sapiens; identical to SEQ ID NO: 8861
  Heavy chain

SEQ ID NO: 9043 - protein, 123 aa, Homo sapiens; identical to SEQ ID NO: 8861
  Heavy chain

SEQ ID NO: 9044 - protein, 123 aa, Homo sapiens; identical to SEQ ID NO: 8861
  Heavy chain

SEQ ID NO: 9045 - protein, 131 aa, Homo sapiens
  Heavy chain
QVQLVESGGGVVQPGRSLRLSCAASGFTFSSYGMHWVRQAPGKGLEWVAVIWYDGSNKYYADSVKGRFTISRDNSKNTLYLQMNSLRAEDTAVYYCARGGDIVVVPAAMRDYYYYGMDVWGQGTTVTVSSA

SEQ ID NO: 9046 - protein, 6 aa, Homo sapiens
  Light chain CDR1
QGISSY

SEQ ID NO: 9047 - protein, 6 aa, Homo sapiens
  Light chain CDR1
QGISNY

SEQ ID NO: 9048 - protein, 6 aa, Homo sapiens
  Light chain CDR1
QGISSY

SEQ ID NO: 9049 - protein, 6 aa, Homo sapiens
  Light chain CDR1
QGINNY

SEQ ID NO: 9050 - protein, 6 aa, Homo sapiens
  Light chain CDR1
QGISSY

SEQ ID NO: 9051 - protein, 7 aa, Homo sapiens
  Light chain CDR1
QSVSSSY

SEQ ID NO: 9052 - protein, 6 aa, Homo sapiens
  Light chain CDR1
QSIGSS

SEQ ID NO: 9053 - protein, 6 aa, Homo sapiens
  Light chain CDR1
QGISSY

SEQ ID NO: 9054 - protein, 6 aa, Homo sapiens
  Light chain CDR1
QGIRND

SEQ ID NO: 9055 - protein, 7 aa, Homo sapiens
  Light chain CDR1
QSVSSSY

SEQ ID NO: 9056 - protein, 6 aa, Homo sapiens
  Light chain CDR1
QGINNY

SEQ ID NO: 9057 - protein, 6 aa, Homo sapiens
  Light chain CDR1
QGIRND

SEQ ID NO: 9058 - protein, 6 aa, Homo sapiens
  Light chain CDR1
QGIGND

SEQ ID NO: 9059 - protein, 6 aa, Homo sapiens
  Light chain CDR1
QGINNY

SEQ ID NO: 9060 - protein, 6 aa, Homo sapiens
  Light chain CDR1
QGISSY

SEQ ID NO: 9061 - protein, 6 aa, Homo sapiens
  Light chain CDR1
QGISSY

SEQ ID NO: 9062 - protein, 6 aa, Homo sapiens
  Light chain CDR1
QSISSY

SEQ ID NO: 9063 - protein, 6 aa, Homo sapiens
  Light chain CDR1
QGISSY

SEQ ID NO: 9064 - protein, 6 aa, Homo sapiens
  Light chain CDR1
QGISNY

SEQ ID NO: 9065 - protein, 6 aa, Homo sapiens
  Light chain CDR1
QGISSY

SEQ ID NO: 9066 - protein, 6 aa, Homo sapiens
  Light chain CDR1
QGISSY

SEQ ID NO: 9067 - protein, 6 aa, Homo sapiens
  Light chain CDR1
QGINNY

SEQ ID NO: 9068 - protein, 6 aa, Homo sapiens
  Light chain CDR1
QGISSY

SEQ ID NO: 9069 - protein, 7 aa, Homo sapiens
  Light chain CDR1
QSVSSSY

SEQ ID NO: 9070 - protein, 6 aa, Homo sapiens
  Light chain CDR1
QSIGSS

SEQ ID NO: 9071 - protein, 6 aa, Homo sapiens
  Light chain CDR1
QGISSY

SEQ ID NO: 9072 - protein, 6 aa, Homo sapiens
  Light chain CDR1
QGISNY

SEQ ID NO: 9073 - protein, 6 aa, Homo sapiens
  Light chain CDR1
QDISNY

SEQ ID NO: 9074 - protein, 6 aa, Homo sapiens
  Light chain CDR1
QGISSY

SEQ ID NO: 9075 - protein, 7 aa, Homo sapiens
  Light chain CDR1
QSVSSSY

SEQ ID NO: 9076 - protein, 6 aa, Homo sapiens
  Light chain CDR1
QGISSY

SEQ ID NO: 9077 - protein, 6 aa, Homo sapiens
  Light chain CDR1
QSIGSS

SEQ ID NO: 9078 - protein, 6 aa, Homo sapiens
  Light chain CDR1
QGISSY

SEQ ID NO: 9079 - protein, 6 aa, Homo sapiens
  Light chain CDR1
QGISSY

SEQ ID NO: 9080 - protein, 6 aa, Homo sapiens
  Light chain CDR1
QGISSY

SEQ ID NO: 9081 - protein, 6 aa, Homo sapiens
  Light chain CDR1
QGISSY

SEQ ID NO: 9082 - protein, 6 aa, Homo sapiens
  Light chain CDR1
QGINNY

SEQ ID NO: 9083 - protein, 6 aa, Homo sapiens
  Light chain CDR1
QGISSW

SEQ ID NO: 9084 - protein, 6 aa, Homo sapiens
  Light chain CDR1
QGISSY

SEQ ID NO: 9085 - protein, 7 aa, Homo sapiens
  Light chain CDR1
QSVSSSY

SEQ ID NO: 9086 - protein, 7 aa, Homo sapiens
  Light chain CDR1
QSVSSSY

SEQ ID NO: 9087 - protein, 7 aa, Homo sapiens
  Light chain CDR1
QSVSSSY

SEQ ID NO: 9088 - protein, 6 aa, Homo sapiens
  Light chain CDR1
QGINNY

SEQ ID NO: 9089 - protein, 6 aa, Homo sapiens
  Light chain CDR1
QGINNY

SEQ ID NO: 9090 - protein, 6 aa, Homo sapiens
  Light chain CDR1
QGIRND

SEQ ID NO: 9091 - protein, 6 aa, Homo sapiens
  Light chain CDR1
QGIRND

SEQ ID NO: 9092 - protein, 6 aa, Homo sapiens
  Light chain CDR1
QSIGSS

SEQ ID NO: 9093 - protein, 6 aa, Homo sapiens
  Light chain CDR1
QGIRND

SEQ ID NO: 9094 - protein, 6 aa, Homo sapiens
  Light chain CDR1
QGIRND

SEQ ID NO: 9095 - protein, 6 aa, Homo sapiens
  Light chain CDR1
QGISSY

SEQ ID NO: 9096 - protein, 6 aa, Homo sapiens
  Light chain CDR1
EGIGNY

SEQ ID NO: 9097 - protein, 6 aa, Homo sapiens
  Light chain CDR1
QSIGSS

SEQ ID NO: 9098 - protein, 6 aa, Homo sapiens
  Light chain CDR1
QGINNY

SEQ ID NO: 9099 - protein, 7 aa, Homo sapiens
  Light chain CDR1
QSVSSSY

SEQ ID NO: 9100 - protein, 6 aa, Homo sapiens
  Light chain CDR1
QGISNY

SEQ ID NO: 9101 - protein, 6 aa, Homo sapiens
  Light chain CDR1
QGISSY

SEQ ID NO: 9102 - protein, 6 aa, Homo sapiens
  Light chain CDR1
QGISSY

SEQ ID NO: 9103 - protein, 6 aa, Homo sapiens
  Light chain CDR1
QGISSY

SEQ ID NO: 9104 - protein, 6 aa, Homo sapiens
  Light chain CDR1
QGISNY

SEQ ID NO: 9105 - protein, 6 aa, Homo sapiens
  Light chain CDR1
QGIGND

SEQ ID NO: 9106 - protein, 7 aa, Homo sapiens
  Light chain CDR1
QSVSSSY

SEQ ID NO: 9107 - protein, 7 aa, Homo sapiens
  Light chain CDR1
QSVSSSY

SEQ ID NO: 9108 - protein, 6 aa, Homo sapiens
  Light chain CDR1
QGISSY

SEQ ID NO: 9109 - protein, 7 aa, Homo sapiens
  Light chain CDR1
QSVSSSY

SEQ ID NO: 9110 - protein, 6 aa, Homo sapiens
  Light chain CDR1
QGIRND

SEQ ID NO: 9111 - protein, 6 aa, Homo sapiens
  Light chain CDR1
QGISNY

SEQ ID NO: 9112 - protein, 6 aa, Homo sapiens
  Light chain CDR1
QSIGSS

SEQ ID NO: 9113 - protein, 6 aa, Homo sapiens
  Light chain CDR1
QGIRND

SEQ ID NO: 9114 - protein, 6 aa, Homo sapiens
  Light chain CDR1
QGIRND

SEQ ID NO: 9115 - protein, 6 aa, Homo sapiens
  Light chain CDR1
QGIRND

SEQ ID NO: 9116 - protein, 6 aa, Homo sapiens
  Light chain CDR1
QGIRND

SEQ ID NO: 9117 - protein, 6 aa, Homo sapiens
  Light chain CDR1
QGIRND

SEQ ID NO: 9118 - protein, 6 aa, Homo sapiens
  Light chain CDR1
QGIRND

SEQ ID NO: 9119 - protein, 6 aa, Homo sapiens
  Light chain CDR1
QGIRND

SEQ ID NO: 9120 - protein, 6 aa, Homo sapiens
  Light chain CDR1
QGIRND

SEQ ID NO: 9121 - protein, 6 aa, Homo sapiens
  Light chain CDR1
QGIRND

SEQ ID NO: 9122 - protein, 6 aa, Homo sapiens
  Light chain CDR1
QGIRND

SEQ ID NO: 9123 - protein, 6 aa, Homo sapiens
  Light chain CDR1
QGIRND

SEQ ID NO: 9124 - protein, 6 aa, Homo sapiens
  Light chain CDR1
QGISSA

SEQ ID NO: 9125 - protein, 6 aa, Homo sapiens
  Light chain CDR1
QGIRND

SEQ ID NO: 9126 - protein, 6 aa, Homo sapiens
  Light chain CDR1
QGIRND

SEQ ID NO: 9127 - protein, 6 aa, Homo sapiens
  Light chain CDR1
QGISNY

SEQ ID NO: 9128 - protein, 6 aa, Homo sapiens
  Light chain CDR1
QGIRND

SEQ ID NO: 9129 - protein, 6 aa, Homo sapiens
  Light chain CDR1
QSVSSN

SEQ ID NO: 9130 - protein, 7 aa, Homo sapiens
  Light chain CDR1
QSVSSSY

SEQ ID NO: 9131 - protein, 6 aa, Homo sapiens
  Light chain CDR1
QGIRND

SEQ ID NO: 9132 - protein, 6 aa, Homo sapiens
  Light chain CDR1
QGIRND

SEQ ID NO: 9133 - protein, 6 aa, Homo sapiens
  Light chain CDR1
QGIRND

SEQ ID NO: 9134 - protein, 6 aa, Homo sapiens
  Light chain CDR1
QGIRND

SEQ ID NO: 9135 - protein, 6 aa, Homo sapiens
  Light chain CDR1
QGISSY

SEQ ID NO: 9136 - protein, 6 aa, Homo sapiens
  Light chain CDR1
QGISSA

SEQ ID NO: 9137 - protein, 6 aa, Homo sapiens
  Light chain CDR1
QGIRND

SEQ ID NO: 9138 - protein, 6 aa, Homo sapiens
  Light chain CDR1
QGIRND

SEQ ID NO: 9139 - protein, 6 aa, Homo sapiens
  Light chain CDR1
QGIRND

SEQ ID NO: 9140 - protein, 6 aa, Homo sapiens
  Light chain CDR1
QGIGSS

SEQ ID NO: 9141 - protein, 6 aa, Homo sapiens
  Light chain CDR1
QGIRND

SEQ ID NO: 9142 - protein, 6 aa, Homo sapiens
  Light chain CDR1
QGISNY

SEQ ID NO: 9143 - protein, 6 aa, Homo sapiens
  Light chain CDR1
QGIRND

SEQ ID NO: 9144 - protein, 6 aa, Homo sapiens
  Light chain CDR1
QGIRND

SEQ ID NO: 9145 - protein, 6 aa, Homo sapiens
  Light chain CDR1
QGIRND

SEQ ID NO: 9146 - protein, 6 aa, Homo sapiens
  Light chain CDR1
QGIRND

SEQ ID NO: 9147 - protein, 6 aa, Homo sapiens
  Light chain CDR1
QGISSA

SEQ ID NO: 9148 - protein, 6 aa, Homo sapiens
  Light chain CDR1
QSVSSN

SEQ ID NO: 9149 - protein, 6 aa, Homo sapiens
  Light chain CDR1
QGIRND

SEQ ID NO: 9150 - protein, 6 aa, Homo sapiens
  Light chain CDR1
QGISNY

SEQ ID NO: 9151 - protein, 6 aa, Homo sapiens
  Light chain CDR1
QVIRND

SEQ ID NO: 9152 - protein, 6 aa, Homo sapiens
  Light chain CDR1
QGISNY

SEQ ID NO: 9153 - protein, 6 aa, Homo sapiens
  Light chain CDR1
QSVSSY

SEQ ID NO: 9154 - protein, 6 aa, Homo sapiens
  Light chain CDR1
QGISNY

SEQ ID NO: 9155 - protein, 6 aa, Homo sapiens
  Light chain CDR1
QSVSSN

SEQ ID NO: 9156 - protein, 6 aa, Homo sapiens
  Light chain CDR1
QGISNY

SEQ ID NO: 9157 - protein, 6 aa, Homo sapiens
  Light chain CDR1
QGIRND

SEQ ID NO: 9158 - protein, 7 aa, Homo sapiens
  Light chain CDR1
QSVSSSY

SEQ ID NO: 9159 - protein, 6 aa, Homo sapiens
  Light chain CDR1
QGISNY

SEQ ID NO: 9160 - protein, 6 aa, Homo sapiens
  Light chain CDR1
QSVSSY

SEQ ID NO: 9161 - protein, 6 aa, Homo sapiens
  Light chain CDR1
QGISNY

SEQ ID NO: 9162 - protein, 6 aa, Homo sapiens
  Light chain CDR1
QSVSSN

SEQ ID NO: 9163 - protein, 6 aa, Homo sapiens
  Light chain CDR1
QSIISW

SEQ ID NO: 9164 - protein, 6 aa, Homo sapiens
  Light chain CDR1
QSIISW

SEQ ID NO: 9165 - protein, 6 aa, Homo sapiens
  Light chain CDR1
QSVSSY

SEQ ID NO: 9166 - protein, 6 aa, Homo sapiens
  Light chain CDR1
QSVSSY

SEQ ID NO: 9167 - protein, 6 aa, Homo sapiens
  Light chain CDR1
QGIRSD

SEQ ID NO: 9168 - protein, 6 aa, Homo sapiens
  Light chain CDR1
QVISNY

SEQ ID NO: 9169 - protein, 6 aa, Homo sapiens
  Light chain CDR1
QGISTY

SEQ ID NO: 9170 - protein, 6 aa, Homo sapiens
  Light chain CDR1
QSVSSW

SEQ ID NO: 9171 - protein, 6 aa, Homo sapiens
  Light chain CDR1
QSVSSN

SEQ ID NO: 9172 - protein, 6 aa, Homo sapiens
  Light chain CDR1
QSVSSY

SEQ ID NO: 9173 - protein, 7 aa, Homo sapiens
  Light chain CDR1
QSISSSY

SEQ ID NO: 9174 - protein, 6 aa, Homo sapiens
  Light chain CDR1
QSVSSN

SEQ ID NO: 9175 - protein, 6 aa, Homo sapiens
  Light chain CDR1
QSVSSN

SEQ ID NO: 9176 - protein, 6 aa, Homo sapiens
  Light chain CDR1
QSVSSN

SEQ ID NO: 9177 - protein, 6 aa, Homo sapiens
  Light chain CDR1
QSVSSN

SEQ ID NO: 9178 - protein, 6 aa, Homo sapiens
  Light chain CDR1
QSVSSN

SEQ ID NO: 9179 - protein, 6 aa, Homo sapiens
  Light chain CDR1
QSIISW

SEQ ID NO: 9180 - protein, 6 aa, Homo sapiens
  Light chain CDR1
QSVSSN

SEQ ID NO: 9181 - protein, 6 aa, Homo sapiens
  Light chain CDR1
QSVSSN

SEQ ID NO: 9182 - protein, 6 aa, Homo sapiens
  Light chain CDR1
QDIRND

SEQ ID NO: 9183 - protein, 6 aa, Homo sapiens
  Light chain CDR1
QGIRND

SEQ ID NO: 9184 - protein, 6 aa, Homo sapiens
  Light chain CDR1
QDIRND

SEQ ID NO: 9185 - protein, 6 aa, Homo sapiens
  Light chain CDR1
QGIRND

SEQ ID NO: 9186 - protein, 6 aa, Homo sapiens
  Light chain CDR1
QDIRND

SEQ ID NO: 9187 - protein, 6 aa, Homo sapiens
  Light chain CDR1
QDIRND

SEQ ID NO: 9188 - protein, 6 aa, Homo sapiens
  Light chain CDR1
QGIRND

SEQ ID NO: 9189 - protein, 6 aa, Homo sapiens
  Light chain CDR1
QDIRND

SEQ ID NO: 9190 - protein, 6 aa, Homo sapiens
  Light chain CDR1
QGIRND

SEQ ID NO: 9191 - protein, 6 aa, Homo sapiens
  Light chain CDR1
QDIRND

SEQ ID NO: 9192 - protein, 6 aa, Homo sapiens
  Light chain CDR1
QDIRND

SEQ ID NO: 9193 - protein, 6 aa, Homo sapiens
  Light chain CDR1
QDIRND

SEQ ID NO: 9194 - protein, 6 aa, Homo sapiens
  Light chain CDR1
QGIRND

SEQ ID NO: 9195 - protein, 6 aa, Homo sapiens
  Light chain CDR1
QDIRND

SEQ ID NO: 9196 - protein, 6 aa, Homo sapiens
  Light chain CDR1
QDIRND

SEQ ID NO: 9197 - protein, 6 aa, Homo sapiens
  Light chain CDR1
QDIRND

SEQ ID NO: 9198 - protein, 6 aa, Homo sapiens
  Light chain CDR1
QGIRND

SEQ ID NO: 9199 - protein, 6 aa, Homo sapiens
  Light chain CDR1
QGIRND

SEQ ID NO: 9200 - protein, 6 aa, Homo sapiens
  Light chain CDR1
QGIRND

SEQ ID NO: 9201 - protein, 6 aa, Homo sapiens
  Light chain CDR1
QDIRND

SEQ ID NO: 9202 - protein, 6 aa, Homo sapiens
  Light chain CDR1
QGIRND

SEQ ID NO: 9203 - protein, 6 aa, Homo sapiens
  Light chain CDR1
QGIRND

SEQ ID NO: 9204 - protein, 6 aa, Homo sapiens
  Light chain CDR1
QDIRND

SEQ ID NO: 9205 - protein, 6 aa, Homo sapiens
  Light chain CDR1
QDIRND

SEQ ID NO: 9206 - protein, 6 aa, Homo sapiens
  Light chain CDR1
QDIRND

SEQ ID NO: 9207 - protein, 6 aa, Homo sapiens
  Light chain CDR1
QDIRND

SEQ ID NO: 9208 - protein, 6 aa, Homo sapiens
  Light chain CDR1
QDIRND

SEQ ID NO: 9209 - protein, 6 aa, Homo sapiens
  Light chain CDR1
QDIRND

SEQ ID NO: 9210 - protein, 6 aa, Homo sapiens
  Light chain CDR1
QDIRND

SEQ ID NO: 9211 - protein, 6 aa, Homo sapiens
  Light chain CDR1
QGIRND

SEQ ID NO: 9212 - protein, 6 aa, Homo sapiens
  Light chain CDR1
QGISSY

SEQ ID NO: 9213 - protein, 6 aa, Homo sapiens
  Light chain CDR1
QGIRND

SEQ ID NO: 9214 - protein, 6 aa, Homo sapiens
  Light chain CDR1
QGISNY

SEQ ID NO: 9215 - protein, 6 aa, Homo sapiens
  Light chain CDR1
QGIRND

SEQ ID NO: 9216 - protein, 6 aa, Homo sapiens
  Light chain CDR1
QGIRNE

SEQ ID NO: 9217 - protein, 6 aa, Homo sapiens
  Light chain CDR1
QGIRND

SEQ ID NO: 9218 - protein, 6 aa, Homo sapiens
  Light chain CDR1
QGIRND

SEQ ID NO: 9219 - protein, 6 aa, Homo sapiens
  Light chain CDR1
QGIRND

SEQ ID NO: 9220 - protein, 6 aa, Homo sapiens
  Light chain CDR1
QGIRND

SEQ ID NO: 9221 - protein, 6 aa, Homo sapiens
  Light chain CDR1
QGISSY

SEQ ID NO: 9222 - protein, 6 aa, Homo sapiens
  Light chain CDR1
QGIRND

SEQ ID NO: 9223 - protein, 6 aa, Homo sapiens
  Light chain CDR1
QGISSY

SEQ ID NO: 9224 - protein, 6 aa, Homo sapiens
  Light chain CDR1
QDIRND

SEQ ID NO: 9225 - protein, 6 aa, Homo sapiens
  Light chain CDR1
QGIRND

SEQ ID NO: 9226 - protein, 6 aa, Homo sapiens
  Light chain CDR1
QGIRNE

SEQ ID NO: 9227 - protein, 6 aa, Homo sapiens
  Light chain CDR1
QSVSSN

SEQ ID NO: 9228 - protein, 6 aa, Homo sapiens
  Light chain CDR1
QGIRND

SEQ ID NO: 9229 - protein, 6 aa, Homo sapiens
  Light chain CDR1
QGIRND

SEQ ID NO: 9230 - protein, 6 aa, Homo sapiens
  Light chain CDR1
QGISDY

SEQ ID NO: 9231 - protein, 6 aa, Homo sapiens
  Light chain CDR1
QGIRND

SEQ ID NO: 9232 - protein, 6 aa, Homo sapiens
  Light chain CDR1
QGIRND

SEQ ID NO: 9233 - protein, 6 aa, Homo sapiens
  Light chain CDR1
QGIRND

SEQ ID NO: 9234 - protein, 6 aa, Homo sapiens
  Light chain CDR1
QGISSY

SEQ ID NO: 9235 - protein, 6 aa, Homo sapiens
  Light chain CDR1
QGIRND

SEQ ID NO: 9236 - protein, 6 aa, Homo sapiens
  Light chain CDR1
QGIRND

SEQ ID NO: 9237 - protein, 6 aa, Homo sapiens
  Light chain CDR1
QGISSY

SEQ ID NO: 9238 - protein, 6 aa, Homo sapiens
  Light chain CDR1
QGIRND

SEQ ID NO: 9239 - protein, 6 aa, Homo sapiens
  Light chain CDR1
QGIRND

SEQ ID NO: 9240 - protein, 6 aa, Homo sapiens
  Light chain CDR1
QDIRND

SEQ ID NO: 9241 - protein, 6 aa, Homo sapiens
  Light chain CDR1
QDIRND

SEQ ID NO: 9242 - protein, 6 aa, Homo sapiens
  Light chain CDR1
QGIRND

SEQ ID NO: 9243 - protein, 6 aa, Homo sapiens
  Light chain CDR1
QGIRND

SEQ ID NO: 9244 - protein, 6 aa, Homo sapiens
  Light chain CDR1
QGIRND

SEQ ID NO: 9245 - protein, 6 aa, Homo sapiens
  Light chain CDR1
QGISSY

SEQ ID NO: 9246 - protein, 6 aa, Homo sapiens
  Light chain CDR1
QDISNY

SEQ ID NO: 9247 - protein, 6 aa, Homo sapiens
  Light chain CDR1
QGIRND

SEQ ID NO: 9248 - protein, 6 aa, Homo sapiens
  Light chain CDR1
QGIRND

SEQ ID NO: 9249 - protein, 6 aa, Homo sapiens
  Light chain CDR1
QGIRND

SEQ ID NO: 9250 - protein, 6 aa, Homo sapiens
  Light chain CDR1
QDIRND

SEQ ID NO: 9251 - protein, 6 aa, Homo sapiens
  Light chain CDR1
QGIRND

SEQ ID NO: 9252 - protein, 6 aa, Homo sapiens
  Light chain CDR1
QGISSY

SEQ ID NO: 9253 - protein, 6 aa, Homo sapiens
  Light chain CDR1
QGISSY

SEQ ID NO: 9254 - protein, 6 aa, Homo sapiens
  Light chain CDR1
QGIRND

SEQ ID NO: 9255 - protein, 6 aa, Homo sapiens
  Light chain CDR1
QGISNY

SEQ ID NO: 9256 - protein, 6 aa, Homo sapiens
  Light chain CDR1
QGISSY

SEQ ID NO: 9257 - protein, 6 aa, Homo sapiens
  Light chain CDR1
QGIRND

SEQ ID NO: 9258 - protein, 6 aa, Homo sapiens
  Light chain CDR1
QGIRND

SEQ ID NO: 9259 - protein, 6 aa, Homo sapiens
  Light chain CDR1
QDIRND

SEQ ID NO: 9260 - protein, 6 aa, Homo sapiens
  Light chain CDR1
QDISNY

SEQ ID NO: 9261 - protein, 6 aa, Homo sapiens
  Light chain CDR1
QGIRND

SEQ ID NO: 9262 - protein, 6 aa, Homo sapiens
  Light chain CDR1
QGIRND

SEQ ID NO: 9263 - protein, 6 aa, Homo sapiens
  Light chain CDR1
QTISSW

SEQ ID NO: 9264 - protein, 6 aa, Homo sapiens
  Light chain CDR1
QGISNY

SEQ ID NO: 9265 - protein, 6 aa, Homo sapiens
  Light chain CDR1
QGIRND

SEQ ID NO: 9266 - protein, 6 aa, Homo sapiens
  Light chain CDR1
QGIRND

SEQ ID NO: 9267 - protein, 6 aa, Homo sapiens
  Light chain CDR1
QDIRND

SEQ ID NO: 9268 - protein, 6 aa, Homo sapiens
  Light chain CDR1
QGIRND

SEQ ID NO: 9269 - protein, 6 aa, Homo sapiens
  Light chain CDR1
QGIRND

SEQ ID NO: 9270 - protein, 6 aa, Homo sapiens
  Light chain CDR1
QGIRND

SEQ ID NO: 9271 - protein, 6 aa, Homo sapiens
  Light chain CDR1
QSVSSN

SEQ ID NO: 9272 - protein, 6 aa, Homo sapiens
  Light chain CDR1
QGISNY

SEQ ID NO: 9273 - protein, 6 aa, Homo sapiens
  Light chain CDR1
QGIRND

SEQ ID NO: 9274 - protein, 6 aa, Homo sapiens
  Light chain CDR1
QGIRND

SEQ ID NO: 9275 - protein, 6 aa, Homo sapiens
  Light chain CDR1
QGISNY

SEQ ID NO: 9276 - protein, 6 aa, Homo sapiens
  Light chain CDR1
QGIRND

SEQ ID NO: 9277 - protein, 6 aa, Homo sapiens
  Light chain CDR1
QGIRND

SEQ ID NO: 9278 - protein, 6 aa, Homo sapiens
  Light chain CDR1
QGIRND

SEQ ID NO: 9279 - protein, 6 aa, Homo sapiens
  Light chain CDR1
QSISSY

SEQ ID NO: 9280 - protein, 6 aa, Homo sapiens
  Light chain CDR1
QGIRND

SEQ ID NO: 9281 - protein, 6 aa, Homo sapiens
  Light chain CDR1
QGIRND

SEQ ID NO: 9282 - protein, 6 aa, Homo sapiens
  Light chain CDR1
QTISSW

SEQ ID NO: 9283 - protein, 7 aa, Homo sapiens
  Light chain CDR1
QSVSSSY

SEQ ID NO: 9284 - protein, 6 aa, Homo sapiens
  Light chain CDR1
QGIRND

SEQ ID NO: 9285 - protein, 6 aa, Homo sapiens
  Light chain CDR1
QGIRND

SEQ ID NO: 9286 - protein, 6 aa, Homo sapiens
  Light chain CDR1
QGIRND

SEQ ID NO: 9287 - protein, 7 aa, Homo sapiens
  Light chain CDR1
QSVSSSY

SEQ ID NO: 9288 - protein, 7 aa, Homo sapiens
  Light chain CDR1
QSVSSSY

SEQ ID NO: 9289 - protein, 7 aa, Homo sapiens
  Light chain CDR1
QSVSSSY

SEQ ID NO: 9290 - protein, 6 aa, Homo sapiens
  Light chain CDR1
QSVSSN

SEQ ID NO: 9291 - protein, 6 aa, Homo sapiens
  Light chain CDR1
QGIRND

SEQ ID NO: 9292 - protein, 6 aa, Homo sapiens
  Light chain CDR1
QGISNY

SEQ ID NO: 9293 - protein, 6 aa, Homo sapiens
  Light chain CDR1
QDIRND

SEQ ID NO: 9294 - protein, 6 aa, Homo sapiens
  Light chain CDR1
KGIRND

SEQ ID NO: 9295 - protein, 6 aa, Homo sapiens
  Light chain CDR1
QGIRND

SEQ ID NO: 9296 - protein, 6 aa, Homo sapiens
  Light chain CDR1
QTISSW

SEQ ID NO: 9297 - protein, 7 aa, Homo sapiens
  Light chain CDR1
QSISSSY

SEQ ID NO: 9298 - protein, 6 aa, Homo sapiens
  Light chain CDR1
QGIRND

SEQ ID NO: 9299 - protein, 6 aa, Homo sapiens
  Light chain CDR1
QGIRND

SEQ ID NO: 9300 - protein, 6 aa, Homo sapiens
  Light chain CDR1
QTISSW

SEQ ID NO: 9301 - protein, 6 aa, Homo sapiens
  Light chain CDR1
QGIRND

SEQ ID NO: 9302 - protein, 6 aa, Homo sapiens
  Light chain CDR1
QSVSSN

SEQ ID NO: 9303 - protein, 6 aa, Homo sapiens
  Light chain CDR1
QGIAHY

SEQ ID NO: 9304 - protein, 6 aa, Homo sapiens
  Light chain CDR1
QGIRND

SEQ ID NO: 9305 - protein, 6 aa, Homo sapiens
  Light chain CDR1
QGISSW

SEQ ID NO: 9306 - protein, 6 aa, Homo sapiens
  Light chain CDR1
QSVSSN

SEQ ID NO: 9307 - protein, 6 aa, Homo sapiens
  Light chain CDR1
QGIRND

SEQ ID NO: 9308 - protein, 6 aa, Homo sapiens
  Light chain CDR1
QGIRND

SEQ ID NO: 9309 - protein, 6 aa, Homo sapiens
  Light chain CDR1
QSVSSN

SEQ ID NO: 9310 - protein, 6 aa, Homo sapiens
  Light chain CDR1
QSIGSS

SEQ ID NO: 9311 - protein, 6 aa, Homo sapiens
  Light chain CDR1
QSIGSS

SEQ ID NO: 9312 - protein, 6 aa, Homo sapiens
  Light chain CDR1
QSVSSN

SEQ ID NO: 9313 - protein, 6 aa, Homo sapiens
  Light chain CDR1
QSVSSN

SEQ ID NO: 9314 - protein, 6 aa, Homo sapiens
  Light chain CDR1
QSVSSN

SEQ ID NO: 9315 - protein, 6 aa, Homo sapiens
  Light chain CDR1
QSVSSN

SEQ ID NO: 9316 - protein, 6 aa, Homo sapiens
  Light chain CDR1
QGISSW

SEQ ID NO: 9317 - protein, 6 aa, Homo sapiens
  Light chain CDR1
QSVSSN

SEQ ID NO: 9318 - protein, 6 aa, Homo sapiens
  Light chain CDR1
QSVSSN

SEQ ID NO: 9319 - protein, 6 aa, Homo sapiens
  Light chain CDR1
QSVSSN

SEQ ID NO: 9320 - protein, 6 aa, Homo sapiens
  Light chain CDR1
QSVSSN

SEQ ID NO: 9321 - protein, 6 aa, Homo sapiens
  Light chain CDR1
QSVSSN

SEQ ID NO: 9322 - protein, 6 aa, Homo sapiens
  Light chain CDR1
QSVSSN

SEQ ID NO: 9323 - protein, 6 aa, Homo sapiens
  Light chain CDR1
QSVSSN

SEQ ID NO: 9324 - protein, 6 aa, Homo sapiens
  Light chain CDR1
QSVSSN

SEQ ID NO: 9325 - protein, 6 aa, Homo sapiens
  Light chain CDR1
QSVSSN

SEQ ID NO: 9326 - protein, 6 aa, Homo sapiens
  Light chain CDR1
QSVSSN

SEQ ID NO: 9327 - protein, 11 aa, Homo sapiens
  Light chain CDR1
QSLVYSDGNTY

SEQ ID NO: 9328 - protein, 6 aa, Homo sapiens
  Light chain CDR1
QSVSSN

SEQ ID NO: 9329 - protein, 6 aa, Homo sapiens
  Light chain CDR1
QGIRND

SEQ ID NO: 9330 - protein, 6 aa, Homo sapiens
  Light chain CDR1
QSVSSN

SEQ ID NO: 9331 - protein, 6 aa, Homo sapiens
  Light chain CDR1
QSVSSN

SEQ ID NO: 9332 - protein, 6 aa, Homo sapiens
  Light chain CDR1
QGIRND

SEQ ID NO: 9333 - protein, 6 aa, Homo sapiens
  Light chain CDR1
QSVSSN

SEQ ID NO: 9334 - protein, 6 aa, Homo sapiens
  Light chain CDR1
QGISSA

SEQ ID NO: 9335 - protein, 6 aa, Homo sapiens
  Light chain CDR1
QGIRND

SEQ ID NO: 9336 - protein, 6 aa, Homo sapiens
  Light chain CDR1
QGIRND

SEQ ID NO: 9337 - protein, 6 aa, Homo sapiens
  Light chain CDR1
QGISSY

SEQ ID NO: 9338 - protein, 6 aa, Homo sapiens
  Light chain CDR1
QSVSSN

SEQ ID NO: 9339 - protein, 6 aa, Homo sapiens
  Light chain CDR1
QGIRND

SEQ ID NO: 9340 - protein, 6 aa, Homo sapiens
  Light chain CDR1
QGISSA

SEQ ID NO: 9341 - protein, 6 aa, Homo sapiens
  Light chain CDR1
QGIRND

SEQ ID NO: 9342 - protein, 6 aa, Homo sapiens
  Light chain CDR1
QGIRND

SEQ ID NO: 9343 - protein, 6 aa, Homo sapiens
  Light chain CDR1
QGIRND

SEQ ID NO: 9344 - protein, 6 aa, Homo sapiens
  Light chain CDR1
QSIGSS

SEQ ID NO: 9345 - protein, 7 aa, Homo sapiens
  Light chain CDR1
QSVSSSY

SEQ ID NO: 9346 - protein, 6 aa, Homo sapiens
  Light chain CDR1
QGISSA

SEQ ID NO: 9347 - protein, 6 aa, Homo sapiens
  Light chain CDR1
QGIRND

SEQ ID NO: 9348 - protein, 6 aa, Homo sapiens
  Light chain CDR1
QGIRND

SEQ ID NO: 9349 - protein, 6 aa, Homo sapiens
  Light chain CDR1
QSVSSY

SEQ ID NO: 9350 - protein, 6 aa, Homo sapiens
  Light chain CDR1
QGISSA

SEQ ID NO: 9351 - protein, 6 aa, Homo sapiens
  Light chain CDR1
QGISSA

SEQ ID NO: 9352 - protein, 6 aa, Homo sapiens
  Light chain CDR1
QGIRND

SEQ ID NO: 9353 - protein, 6 aa, Homo sapiens
  Light chain CDR1
QGISSA

SEQ ID NO: 9354 - protein, 6 aa, Homo sapiens
  Light chain CDR1
QSIGSS

SEQ ID NO: 9355 - protein, 6 aa, Homo sapiens
  Light chain CDR1
QGIRND

SEQ ID NO: 9356 - protein, 6 aa, Homo sapiens
  Light chain CDR1
QSVSSN

SEQ ID NO: 9357 - protein, 6 aa, Homo sapiens
  Light chain CDR1
QGIRND

SEQ ID NO: 9358 - protein, 6 aa, Homo sapiens
  Light chain CDR1
QGISSY

SEQ ID NO: 9359 - protein, 6 aa, Homo sapiens
  Light chain CDR1
QGIRND

SEQ ID NO: 9360 - protein, 6 aa, Homo sapiens
  Light chain CDR1
QGIRND

SEQ ID NO: 9361 - protein, 6 aa, Homo sapiens
  Light chain CDR1
QAIRND

SEQ ID NO: 9362 - protein, 6 aa, Homo sapiens
  Light chain CDR1
QGIRND

SEQ ID NO: 9363 - protein, 6 aa, Homo sapiens
  Light chain CDR1
QGIRND

SEQ ID NO: 9364 - protein, 6 aa, Homo sapiens
  Light chain CDR1
QGIRND

SEQ ID NO: 9365 - protein, 6 aa, Homo sapiens
  Light chain CDR1
QGIRND

SEQ ID NO: 9366 - protein, 6 aa, Homo sapiens
  Light chain CDR1
QGIRND

SEQ ID NO: 9367 - protein, 6 aa, Homo sapiens
  Light chain CDR1
QSVSSY

SEQ ID NO: 9368 - protein, 6 aa, Homo sapiens
  Light chain CDR1
QSIGGS

SEQ ID NO: 9369 - protein, 6 aa, Homo sapiens
  Light chain CDR1
QSIGSS

SEQ ID NO: 9370 - protein, 6 aa, Homo sapiens
  Light chain CDR1
QSIGSS

SEQ ID NO: 9371 - protein, 6 aa, Homo sapiens
  Light chain CDR1
QSIGSS

SEQ ID NO: 9372 - protein, 6 aa, Homo sapiens
  Light chain CDR1
QSIGSS

SEQ ID NO: 9373 - protein, 6 aa, Homo sapiens
  Light chain CDR1
QSIGSS

SEQ ID NO: 9374 - protein, 6 aa, Homo sapiens
  Light chain CDR1
QSIGSS

SEQ ID NO: 9375 - protein, 6 aa, Homo sapiens
  Light chain CDR1
QSIGSS

SEQ ID NO: 9376 - protein, 6 aa, Homo sapiens
  Light chain CDR1
QSIGSS

SEQ ID NO: 9377 - protein, 6 aa, Homo sapiens
  Light chain CDR1
QSIGSS

SEQ ID NO: 9378 - protein, 6 aa, Homo sapiens
  Light chain CDR1
QSIGSS

SEQ ID NO: 9379 - protein, 6 aa, Homo sapiens
  Light chain CDR1
QSIGSS

SEQ ID NO: 9380 - protein, 6 aa, Homo sapiens
  Light chain CDR1
QSIGSS

SEQ ID NO: 9381 - protein, 6 aa, Homo sapiens
  Light chain CDR1
QSIGSS

SEQ ID NO: 9382 - protein, 6 aa, Homo sapiens
  Light chain CDR1
QSIGSS

SEQ ID NO: 9383 - protein, 6 aa, Homo sapiens
  Light chain CDR1
QSIGSS

SEQ ID NO: 9384 - protein, 6 aa, Homo sapiens
  Light chain CDR1
QGIISW

SEQ ID NO: 9385 - protein, 6 aa, Homo sapiens
  Light chain CDR1
QGIRND

SEQ ID NO: 9386 - protein, 6 aa, Homo sapiens
  Light chain CDR1
QGISSW

SEQ ID NO: 9387 - protein, 6 aa, Homo sapiens
  Light chain CDR1
QGIRND

SEQ ID NO: 9388 - protein, 6 aa, Homo sapiens
  Light chain CDR1
QGIRND

SEQ ID NO: 9389 - protein, 6 aa, Homo sapiens
  Light chain CDR1
QGIRNE

SEQ ID NO: 9390 - protein, 6 aa, Homo sapiens
  Light chain CDR1
QGIRND

SEQ ID NO: 9391 - protein, 6 aa, Homo sapiens
  Light chain CDR1
QGIRND

SEQ ID NO: 9392 - protein, 6 aa, Homo sapiens
  Light chain CDR1
QGIRNE

SEQ ID NO: 9393 - protein, 6 aa, Homo sapiens
  Light chain CDR1
QDIRND

SEQ ID NO: 9394 - protein, 6 aa, Homo sapiens
  Light chain CDR1
QGIRND

SEQ ID NO: 9395 - protein, 6 aa, Homo sapiens
  Light chain CDR1
QGIRND

SEQ ID NO: 9396 - protein, 6 aa, Homo sapiens
  Light chain CDR1
QGIRND

SEQ ID NO: 9397 - protein, 6 aa, Homo sapiens
  Light chain CDR1
QGIRND

SEQ ID NO: 9398 - protein, 6 aa, Homo sapiens
  Light chain CDR1
QDIRSD

SEQ ID NO: 9399 - protein, 6 aa, Homo sapiens
  Light chain CDR1
QGIRND

SEQ ID NO: 9400 - protein, 6 aa, Homo sapiens
  Light chain CDR1
QGIRND

SEQ ID NO: 9401 - protein, 6 aa, Homo sapiens
  Light chain CDR1
QGIRND

SEQ ID NO: 9402 - protein, 6 aa, Homo sapiens
  Light chain CDR1
QGIRND

SEQ ID NO: 9403 - protein, 6 aa, Homo sapiens
  Light chain CDR1
QAIRND

SEQ ID NO: 9404 - protein, 6 aa, Homo sapiens
  Light chain CDR1
QGIRND

SEQ ID NO: 9405 - protein, 6 aa, Homo sapiens
  Light chain CDR1
QGIRND

SEQ ID NO: 9406 - protein, 6 aa, Homo sapiens
  Light chain CDR1
QGIRND

SEQ ID NO: 9407 - protein, 6 aa, Homo sapiens
  Light chain CDR1
QGIRND

SEQ ID NO: 9408 - protein, 6 aa, Homo sapiens
  Light chain CDR1
QGIRND

SEQ ID NO: 9409 - protein, 6 aa, Homo sapiens
  Light chain CDR1
QGIRND

SEQ ID NO: 9410 - protein, 6 aa, Homo sapiens
  Light chain CDR1
QGIRND

SEQ ID NO: 9411 - protein, 6 aa, Homo sapiens
  Light chain CDR1
QGIRND

SEQ ID NO: 9412 - protein, 6 aa, Homo sapiens
  Light chain CDR1
QGIRND

SEQ ID NO: 9413 - protein, 6 aa, Homo sapiens
  Light chain CDR1
QGIRND

SEQ ID NO: 9414 - protein, 6 aa, Homo sapiens
  Light chain CDR1
QGIRND

SEQ ID NO: 9415 - protein, 6 aa, Homo sapiens
  Light chain CDR1
QGIRND

SEQ ID NO: 9416 - protein, 6 aa, Homo sapiens
  Light chain CDR1
QGIRND

SEQ ID NO: 9417 - protein, 6 aa, Homo sapiens
  Light chain CDR1
QGIRND

SEQ ID NO: 9418 - protein, 6 aa, Homo sapiens
  Light chain CDR1
QGIRND

SEQ ID NO: 9419 - protein, 6 aa, Homo sapiens
  Light chain CDR1
QGIRND

SEQ ID NO: 9420 - protein, 6 aa, Homo sapiens
  Light chain CDR1
QGIRND

SEQ ID NO: 9421 - protein, 6 aa, Homo sapiens
  Light chain CDR1
QGIRND

SEQ ID NO: 9422 - protein, 6 aa, Homo sapiens
  Light chain CDR1
QGIRND

SEQ ID NO: 9423 - protein, 6 aa, Homo sapiens
  Light chain CDR1
QGIRND

SEQ ID NO: 9424 - protein, 6 aa, Homo sapiens
  Light chain CDR1
QGIRND

SEQ ID NO: 9425 - protein, 6 aa, Homo sapiens
  Light chain CDR1
QGIRND

SEQ ID NO: 9426 - protein, 6 aa, Homo sapiens
  Light chain CDR1
QGIRND

SEQ ID NO: 9427 - protein, 6 aa, Homo sapiens
  Light chain CDR1
QGIRND

SEQ ID NO: 9428 - protein, 6 aa, Homo sapiens
  Light chain CDR1
QGIRND

SEQ ID NO: 9429 - protein, 6 aa, Homo sapiens
  Light chain CDR1
QGIRND

SEQ ID NO: 9430 - protein, 6 aa, Homo sapiens
  Light chain CDR1
QGIRND

SEQ ID NO: 9431 - protein, 6 aa, Homo sapiens
  Light chain CDR1
QGIRND

SEQ ID NO: 9432 - protein, 6 aa, Homo sapiens
  Light chain CDR1
QGIRND

SEQ ID NO: 9433 - protein, 6 aa, Homo sapiens
  Light chain CDR1
QGIRND

SEQ ID NO: 9434 - protein, 6 aa, Homo sapiens
  Light chain CDR1
QGIRNE

SEQ ID NO: 9435 - protein, 6 aa, Homo sapiens
  Light chain CDR1
QGIRNE

SEQ ID NO: 9436 - protein, 6 aa, Homo sapiens
  Light chain CDR1
QGIRNE

SEQ ID NO: 9437 - protein, 6 aa, Homo sapiens
  Light chain CDR1
QGIRNE

SEQ ID NO: 9438 - protein, 6 aa, Homo sapiens
  Light chain CDR1
QGIRNE

SEQ ID NO: 9439 - protein, 6 aa, Homo sapiens
  Light chain CDR1
QGIRNE

SEQ ID NO: 9440 - protein, 6 aa, Homo sapiens
  Light chain CDR1
QGIRNE

SEQ ID NO: 9441 - protein, 6 aa, Homo sapiens
  Light chain CDR1
QGIRNE

SEQ ID NO: 9442 - protein, 6 aa, Homo sapiens
  Light chain CDR1
QGIRNE

SEQ ID NO: 9443 - protein, 6 aa, Homo sapiens
  Light chain CDR1
QGIRNE

SEQ ID NO: 9444 - protein, 6 aa, Homo sapiens
  Light chain CDR1
QGIRND

SEQ ID NO: 9445 - protein, 6 aa, Homo sapiens
  Light chain CDR1
QGIRND

SEQ ID NO: 9446 - protein, 6 aa, Homo sapiens
  Light chain CDR1
QGIRNE

SEQ ID NO: 9447 - protein, 6 aa, Homo sapiens
  Light chain CDR1
QSIRND

SEQ ID NO: 9448 - protein, 6 aa, Homo sapiens
  Light chain CDR1
QGIRND

SEQ ID NO: 9449 - protein, 6 aa, Homo sapiens
  Light chain CDR1
QGIRND

SEQ ID NO: 9450 - protein, 6 aa, Homo sapiens
  Light chain CDR1
QGIRND

SEQ ID NO: 9451 - protein, 6 aa, Homo sapiens
  Light chain CDR1
QGIRND

SEQ ID NO: 9452 - protein, 6 aa, Homo sapiens
  Light chain CDR1
QGIRND

SEQ ID NO: 9453 - protein, 6 aa, Homo sapiens
  Light chain CDR1
QGIRND

SEQ ID NO: 9454 - protein, 6 aa, Homo sapiens
  Light chain CDR1
QGIRND

SEQ ID NO: 9455 - protein, 6 aa, Homo sapiens
  Light chain CDR1
QGIRND

SEQ ID NO: 9456 - protein, 6 aa, Homo sapiens
  Light chain CDR1
QGIRND

SEQ ID NO: 9457 - protein, 6 aa, Homo sapiens
  Light chain CDR1
QGIRND

SEQ ID NO: 9458 - protein, 6 aa, Homo sapiens
  Light chain CDR1
QGIRND

SEQ ID NO: 9459 - protein, 6 aa, Homo sapiens
  Light chain CDR1
QGIRND

SEQ ID NO: 9460 - protein, 6 aa, Homo sapiens
  Light chain CDR1
QGIRND

SEQ ID NO: 9461 - protein, 6 aa, Homo sapiens
  Light chain CDR1
QGIRND

SEQ ID NO: 9462 - protein, 6 aa, Homo sapiens
  Light chain CDR1
QGIRND

SEQ ID NO: 9463 - protein, 6 aa, Homo sapiens
  Light chain CDR1
QGIRND

SEQ ID NO: 9464 - protein, 6 aa, Homo sapiens
  Light chain CDR1
QGIRND

SEQ ID NO: 9465 - protein, 6 aa, Homo sapiens
  Light chain CDR1
QGIRND

SEQ ID NO: 9466 - protein, 6 aa, Homo sapiens
  Light chain CDR1
QGIRND

SEQ ID NO: 9467 - protein, 6 aa, Homo sapiens
  Light chain CDR1
QGIRND

SEQ ID NO: 9468 - protein, 6 aa, Homo sapiens
  Light chain CDR1
QGIRND

SEQ ID NO: 9469 - protein, 6 aa, Homo sapiens
  Light chain CDR1
QGIRND

SEQ ID NO: 9470 - protein, 6 aa, Homo sapiens
  Light chain CDR1
QGIRND

SEQ ID NO: 9471 - protein, 6 aa, Homo sapiens
  Light chain CDR1
QGIRND

SEQ ID NO: 9472 - protein, 6 aa, Homo sapiens
  Light chain CDR1
QGIRND

SEQ ID NO: 9473 - protein, 6 aa, Homo sapiens
  Light chain CDR1
QGIRND

SEQ ID NO: 9474 - protein, 6 aa, Homo sapiens
  Light chain CDR1
QGIRND

SEQ ID NO: 9475 - protein, 6 aa, Homo sapiens
  Light chain CDR1
QGIRND

SEQ ID NO: 9476 - protein, 6 aa, Homo sapiens
  Light chain CDR1
QGIRND

SEQ ID NO: 9477 - protein, 6 aa, Homo sapiens
  Light chain CDR1
QGIRND

SEQ ID NO: 9478 - protein, 6 aa, Homo sapiens
  Light chain CDR1
QGISSW

SEQ ID NO: 9479 - protein, 6 aa, Homo sapiens
  Light chain CDR1
QGIRND

SEQ ID NO: 9480 - protein, 6 aa, Homo sapiens
  Light chain CDR1
QGIRND

SEQ ID NO: 9481 - protein, 6 aa, Homo sapiens
  Light chain CDR1
QGITSW

SEQ ID NO: 9482 - protein, 6 aa, Homo sapiens
  Light chain CDR1
QSVSSY

SEQ ID NO: 9483 - protein, 6 aa, Homo sapiens
  Light chain CDR1
QGISSW

SEQ ID NO: 9484 - protein, 7 aa, Homo sapiens
  Light chain CDR1
QSVSSSY

SEQ ID NO: 9485 - protein, 6 aa, Homo sapiens
  Light chain CDR1
QGISSA

SEQ ID NO: 9486 - protein, 6 aa, Homo sapiens
  Light chain CDR1
QGISSW

SEQ ID NO: 9487 - protein, 6 aa, Homo sapiens
  Light chain CDR1
QGISSW

SEQ ID NO: 9488 - protein, 7 aa, Homo sapiens
  Light chain CDR1
QSVSSSY

SEQ ID NO: 9489 - protein, 7 aa, Homo sapiens
  Light chain CDR1
QSVSSSY

SEQ ID NO: 9490 - protein, 7 aa, Homo sapiens
  Light chain CDR1
QSVSSSY

SEQ ID NO: 9491 - protein, 6 aa, Homo sapiens
  Light chain CDR1
QGISSA

SEQ ID NO: 9492 - protein, 6 aa, Homo sapiens
  Light chain CDR1
QGISSA

SEQ ID NO: 9493 - protein, 6 aa, Homo sapiens
  Light chain CDR1
QGISSA

SEQ ID NO: 9494 - protein, 6 aa, Homo sapiens
  Light chain CDR1
QGISSA

SEQ ID NO: 9495 - protein, 6 aa, Homo sapiens
  Light chain CDR1
QGISSA

SEQ ID NO: 9496 - protein, 6 aa, Homo sapiens
  Light chain CDR1
QGISSA

SEQ ID NO: 9497 - protein, 6 aa, Homo sapiens
  Light chain CDR1
QGISSA

SEQ ID NO: 9498 - protein, 6 aa, Homo sapiens
  Light chain CDR1
QGISSW

SEQ ID NO: 9499 - protein, 6 aa, Homo sapiens
  Light chain CDR1
QGISSA

SEQ ID NO: 9500 - protein, 6 aa, Homo sapiens
  Light chain CDR1
QGISSA

SEQ ID NO: 9501 - protein, 6 aa, Homo sapiens
  Light chain CDR1
QGISSA

SEQ ID NO: 9502 - protein, 6 aa, Homo sapiens
  Light chain CDR1
QGISSA

SEQ ID NO: 9503 - protein, 6 aa, Homo sapiens
  Light chain CDR1
QGISSA

SEQ ID NO: 9504 - protein, 6 aa, Homo sapiens
  Light chain CDR1
QGISSA

SEQ ID NO: 9505 - protein, 6 aa, Homo sapiens
  Light chain CDR1
QGISSA

SEQ ID NO: 9506 - protein, 6 aa, Homo sapiens
  Light chain CDR1
QGISSA

SEQ ID NO: 9507 - protein, 6 aa, Homo sapiens
  Light chain CDR1
QGISSA

SEQ ID NO: 9508 - protein, 6 aa, Homo sapiens
  Light chain CDR1
QGISSA

SEQ ID NO: 9509 - protein, 6 aa, Homo sapiens
  Light chain CDR1
QGISSW

SEQ ID NO: 9510 - protein, 6 aa, Homo sapiens
  Light chain CDR1
QGISSW

SEQ ID NO: 9511 - protein, 6 aa, Homo sapiens
  Light chain CDR1
QSISSW

SEQ ID NO: 9512 - protein, 6 aa, Homo sapiens
  Light chain CDR1
QGISSY

SEQ ID NO: 9513 - protein, 6 aa, Homo sapiens
  Light chain CDR1
QGISSY

SEQ ID NO: 9514 - protein, 6 aa, Homo sapiens
  Light chain CDR1
QGISSY

SEQ ID NO: 9515 - protein, 6 aa, Homo sapiens
  Light chain CDR1
QGISSY

SEQ ID NO: 9516 - protein, 6 aa, Homo sapiens
  Light chain CDR1
QGISSS

SEQ ID NO: 9517 - protein, 6 aa, Homo sapiens
  Light chain CDR1
QGITSW

SEQ ID NO: 9518 - protein, 6 aa, Homo sapiens
  Light chain CDR1
QSVSSY

SEQ ID NO: 9519 - protein, 6 aa, Homo sapiens
  Light chain CDR1
QSVSSY

SEQ ID NO: 9520 - protein, 6 aa, Homo sapiens
  Light chain CDR1
QSVSSY

SEQ ID NO: 9521 - protein, 6 aa, Homo sapiens
  Light chain CDR1
QSVSSY

SEQ ID NO: 9522 - protein, 6 aa, Homo sapiens
  Light chain CDR1
QSVSSY

SEQ ID NO: 9523 - protein, 6 aa, Homo sapiens
  Light chain CDR1
QSVSSY

SEQ ID NO: 9524 - protein, 6 aa, Homo sapiens
  Light chain CDR1
QSVSSY

SEQ ID NO: 9525 - protein, 6 aa, Homo sapiens
  Light chain CDR1
QSVSSY

SEQ ID NO: 9526 - protein, 6 aa, Homo sapiens
  Light chain CDR1
QSVSSY

SEQ ID NO: 9527 - protein, 6 aa, Homo sapiens
  Light chain CDR1
QSVSSY

SEQ ID NO: 9528 - protein, 6 aa, Homo sapiens
  Light chain CDR1
QSVSSY

SEQ ID NO: 9529 - protein, 6 aa, Homo sapiens
  Light chain CDR1
QSVSSY

SEQ ID NO: 9530 - protein, 6 aa, Homo sapiens
  Light chain CDR1
QDISSW

SEQ ID NO: 9531 - protein, 7 aa, Homo sapiens
  Light chain CDR1
QSVSSSY

SEQ ID NO: 9532 - protein, 7 aa, Homo sapiens
  Light chain CDR1
QSVSSSY

SEQ ID NO: 9533 - protein, 6 aa, Homo sapiens
  Light chain CDR1
QGISSW

SEQ ID NO: 9534 - protein, 6 aa, Homo sapiens
  Light chain CDR1
QSVSSN

SEQ ID NO: 9535 - protein, 6 aa, Homo sapiens
  Light chain CDR1
QGISSW

SEQ ID NO: 9536 - protein, 6 aa, Homo sapiens
  Light chain CDR1
QSVSSN

SEQ ID NO: 9537 - protein, 6 aa, Homo sapiens
  Light chain CDR1
QSVSSN

SEQ ID NO: 9538 - protein, 6 aa, Homo sapiens
  Light chain CDR1
QSVSSN

SEQ ID NO: 9539 - protein, 6 aa, Homo sapiens
  Light chain CDR1
QSVSSN

SEQ ID NO: 9540 - protein, 6 aa, Homo sapiens
  Light chain CDR1
QSVSSN

SEQ ID NO: 9541 - protein, 6 aa, Homo sapiens
  Light chain CDR1
QGISRW

SEQ ID NO: 9542 - protein, 6 aa, Homo sapiens
  Light chain CDR1
QGITSW

SEQ ID NO: 9543 - protein, 6 aa, Homo sapiens
  Light chain CDR1
QGITSW

SEQ ID NO: 9544 - protein, 6 aa, Homo sapiens
  Light chain CDR1
QGISSW

SEQ ID NO: 9545 - protein, 6 aa, Homo sapiens
  Light chain CDR1
QGISSW

SEQ ID NO: 9546 - protein, 6 aa, Homo sapiens
  Light chain CDR1
QGISSW

SEQ ID NO: 9547 - protein, 6 aa, Homo sapiens
  Light chain CDR1
QGISRW

SEQ ID NO: 9548 - protein, 6 aa, Homo sapiens
  Light chain CDR1
QGISSW

SEQ ID NO: 9549 - protein, 6 aa, Homo sapiens
  Light chain CDR1
QGISSW

SEQ ID NO: 9550 - protein, 6 aa, Homo sapiens
  Light chain CDR1
QGITSW

SEQ ID NO: 9551 - protein, 6 aa, Homo sapiens
  Light chain CDR1
QGISSW

SEQ ID NO: 9552 - protein, 6 aa, Homo sapiens
  Light chain CDR1
QGISSW

SEQ ID NO: 9553 - protein, 6 aa, Homo sapiens
  Light chain CDR1
QGISSW

SEQ ID NO: 9554 - protein, 6 aa, Homo sapiens
  Light chain CDR1
QGISSW

SEQ ID NO: 9555 - protein, 6 aa, Homo sapiens
  Light chain CDR1
QGISSW

SEQ ID NO: 9556 - protein, 6 aa, Homo sapiens
  Light chain CDR1
QGISSW

SEQ ID NO: 9557 - protein, 6 aa, Homo sapiens
  Light chain CDR1
QGISSW

SEQ ID NO: 9558 - protein, 6 aa, Homo sapiens
  Light chain CDR1
QGISSW

SEQ ID NO: 9559 - protein, 6 aa, Homo sapiens
  Light chain CDR1
QGISSW

SEQ ID NO: 9560 - protein, 6 aa, Homo sapiens
  Light chain CDR1
QGISSW

SEQ ID NO: 9561 - protein, 6 aa, Homo sapiens
  Light chain CDR1
QGISSW

SEQ ID NO: 9562 - protein, 6 aa, Homo sapiens
  Light chain CDR1
QGISSW

SEQ ID NO: 9563 - protein, 6 aa, Homo sapiens
  Light chain CDR1
QGISSW

SEQ ID NO: 9564 - protein, 6 aa, Homo sapiens
  Light chain CDR1
QGITSW

SEQ ID NO: 9565 - protein, 6 aa, Homo sapiens
  Light chain CDR1
QSISSW

SEQ ID NO: 9566 - protein, 6 aa, Homo sapiens
  Light chain CDR1
QGISSW

SEQ ID NO: 9567 - protein, 6 aa, Homo sapiens
  Light chain CDR1
QGISNY

SEQ ID NO: 9568 - protein, 6 aa, Homo sapiens
  Light chain CDR1
QNIGSS

SEQ ID NO: 9569 - protein, 3 aa, Homo sapiens
  Light chain CDR2
AAS

SEQ ID NO: 9570 - protein, 3 aa, Homo sapiens
  Light chain CDR2
AAS

SEQ ID NO: 9571 - protein, 3 aa, Homo sapiens
  Light chain CDR2
AAS

SEQ ID NO: 9572 - protein, 3 aa, Homo sapiens
  Light chain CDR2
AAS

SEQ ID NO: 9573 - protein, 3 aa, Homo sapiens
  Light chain CDR2
AAS

SEQ ID NO: 9574 - protein, 3 aa, Homo sapiens
  Light chain CDR2
DAS

SEQ ID NO: 9575 - protein, 3 aa, Homo sapiens
  Light chain CDR2
YAS

SEQ ID NO: 9576 - protein, 3 aa, Homo sapiens
  Light chain CDR2
AAS

SEQ ID NO: 9577 - protein, 3 aa, Homo sapiens
  Light chain CDR2
AAS

SEQ ID NO: 9578 - protein, 3 aa, Homo sapiens
  Light chain CDR2
GAS

SEQ ID NO: 9579 - protein, 3 aa, Homo sapiens
  Light chain CDR2
AAS

SEQ ID NO: 9580 - protein, 3 aa, Homo sapiens
  Light chain CDR2
AAS

SEQ ID NO: 9581 - protein, 3 aa, Homo sapiens
  Light chain CDR2
AAS

SEQ ID NO: 9582 - protein, 3 aa, Homo sapiens
  Light chain CDR2
AAS

SEQ ID NO: 9583 - protein, 3 aa, Homo sapiens
  Light chain CDR2
AAS

SEQ ID NO: 9584 - protein, 3 aa, Homo sapiens
  Light chain CDR2
AAS

SEQ ID NO: 9585 - protein, 3 aa, Homo sapiens
  Light chain CDR2
AAS

SEQ ID NO: 9586 - protein, 3 aa, Homo sapiens
  Light chain CDR2
AAS

SEQ ID NO: 9587 - protein, 3 aa, Homo sapiens
  Light chain CDR2
AAS

SEQ ID NO: 9588 - protein, 3 aa, Homo sapiens
  Light chain CDR2
AAS

SEQ ID NO: 9589 - protein, 3 aa, Homo sapiens
  Light chain CDR2
AAS

SEQ ID NO: 9590 - protein, 3 aa, Homo sapiens
  Light chain CDR2
AAS

SEQ ID NO: 9591 - protein, 3 aa, Homo sapiens
  Light chain CDR2
AAS

SEQ ID NO: 9592 - protein, 3 aa, Homo sapiens
  Light chain CDR2
DAS

SEQ ID NO: 9593 - protein, 3 aa, Homo sapiens
  Light chain CDR2
YAS

SEQ ID NO: 9594 - protein, 3 aa, Homo sapiens
  Light chain CDR2
AAS

SEQ ID NO: 9595 - protein, 3 aa, Homo sapiens
  Light chain CDR2
AAS

SEQ ID NO: 9596 - protein, 3 aa, Homo sapiens
  Light chain CDR2
DAS

SEQ ID NO: 9597 - protein, 3 aa, Homo sapiens
  Light chain CDR2
AAS

SEQ ID NO: 9598 - protein, 3 aa, Homo sapiens
  Light chain CDR2
DAS

SEQ ID NO: 9599 - protein, 3 aa, Homo sapiens
  Light chain CDR2
AAS

SEQ ID NO: 9600 - protein, 3 aa, Homo sapiens
  Light chain CDR2
YAS

SEQ ID NO: 9601 - protein, 3 aa, Homo sapiens
  Light chain CDR2
AAS

SEQ ID NO: 9602 - protein, 3 aa, Homo sapiens
  Light chain CDR2
AAS

SEQ ID NO: 9603 - protein, 3 aa, Homo sapiens
  Light chain CDR2
AAS

SEQ ID NO: 9604 - protein, 3 aa, Homo sapiens
  Light chain CDR2
AAS

SEQ ID NO: 9605 - protein, 3 aa, Homo sapiens
  Light chain CDR2
AAS

SEQ ID NO: 9606 - protein, 3 aa, Homo sapiens
  Light chain CDR2
AAS

SEQ ID NO: 9607 - protein, 3 aa, Homo sapiens
  Light chain CDR2
AAS

SEQ ID NO: 9608 - protein, 3 aa, Homo sapiens
  Light chain CDR2
GAS

SEQ ID NO: 9609 - protein, 3 aa, Homo sapiens
  Light chain CDR2
DAS

SEQ ID NO: 9610 - protein, 3 aa, Homo sapiens
  Light chain CDR2
DAS

SEQ ID NO: 9611 - protein, 3 aa, Homo sapiens
  Light chain CDR2
AAS

SEQ ID NO: 9612 - protein, 3 aa, Homo sapiens
  Light chain CDR2
AAS

SEQ ID NO: 9613 - protein, 3 aa, Homo sapiens
  Light chain CDR2
AAS

SEQ ID NO: 9614 - protein, 3 aa, Homo sapiens
  Light chain CDR2
AAS

SEQ ID NO: 9615 - protein, 3 aa, Homo sapiens
  Light chain CDR2
YAS

SEQ ID NO: 9616 - protein, 3 aa, Homo sapiens
  Light chain CDR2
AAS

SEQ ID NO: 9617 - protein, 3 aa, Homo sapiens
  Light chain CDR2
AAS

SEQ ID NO: 9618 - protein, 3 aa, Homo sapiens
  Light chain CDR2
AAS

SEQ ID NO: 9619 - protein, 3 aa, Homo sapiens
  Light chain CDR2
FAS

SEQ ID NO: 9620 - protein, 3 aa, Homo sapiens
  Light chain CDR2
YAS

SEQ ID NO: 9621 - protein, 3 aa, Homo sapiens
  Light chain CDR2
AAS

SEQ ID NO: 9622 - protein, 3 aa, Homo sapiens
  Light chain CDR2
GAS

SEQ ID NO: 9623 - protein, 3 aa, Homo sapiens
  Light chain CDR2
AAS

SEQ ID NO: 9624 - protein, 3 aa, Homo sapiens
  Light chain CDR2
AAS

SEQ ID NO: 9625 - protein, 3 aa, Homo sapiens
  Light chain CDR2
AAS

SEQ ID NO: 9626 - protein, 3 aa, Homo sapiens
  Light chain CDR2
AAS

SEQ ID NO: 9627 - protein, 3 aa, Homo sapiens
  Light chain CDR2
AAS

SEQ ID NO: 9628 - protein, 3 aa, Homo sapiens
  Light chain CDR2
AAS

SEQ ID NO: 9629 - protein, 3 aa, Homo sapiens
  Light chain CDR2
GAS

SEQ ID NO: 9630 - protein, 3 aa, Homo sapiens
  Light chain CDR2
GAS

SEQ ID NO: 9631 - protein, 3 aa, Homo sapiens
  Light chain CDR2
AAS

SEQ ID NO: 9632 - protein, 3 aa, Homo sapiens
  Light chain CDR2
GAS

SEQ ID NO: 9633 - protein, 3 aa, Homo sapiens
  Light chain CDR2
AAS

SEQ ID NO: 9634 - protein, 3 aa, Homo sapiens
  Light chain CDR2
AAS

SEQ ID NO: 9635 - protein, 3 aa, Homo sapiens
  Light chain CDR2
YAS

SEQ ID NO: 9636 - protein, 3 aa, Homo sapiens
  Light chain CDR2
AAS

SEQ ID NO: 9637 - protein, 3 aa, Homo sapiens
  Light chain CDR2
AAS

SEQ ID NO: 9638 - protein, 3 aa, Homo sapiens
  Light chain CDR2
AAS

SEQ ID NO: 9639 - protein, 3 aa, Homo sapiens
  Light chain CDR2
AAS

SEQ ID NO: 9640 - protein, 3 aa, Homo sapiens
  Light chain CDR2
AAS

SEQ ID NO: 9641 - protein, 3 aa, Homo sapiens
  Light chain CDR2
AAS

SEQ ID NO: 9642 - protein, 3 aa, Homo sapiens
  Light chain CDR2
AAS

SEQ ID NO: 9643 - protein, 3 aa, Homo sapiens
  Light chain CDR2
AAS

SEQ ID NO: 9644 - protein, 3 aa, Homo sapiens
  Light chain CDR2
AAS

SEQ ID NO: 9645 - protein, 3 aa, Homo sapiens
  Light chain CDR2
AAS

SEQ ID NO: 9646 - protein, 3 aa, Homo sapiens
  Light chain CDR2
AAS

SEQ ID NO: 9647 - protein, 3 aa, Homo sapiens
  Light chain CDR2
AAS

SEQ ID NO: 9648 - protein, 3 aa, Homo sapiens
  Light chain CDR2
AAS

SEQ ID NO: 9649 - protein, 3 aa, Homo sapiens
  Light chain CDR2
AAS

SEQ ID NO: 9650 - protein, 3 aa, Homo sapiens
  Light chain CDR2
AAS

SEQ ID NO: 9651 - protein, 3 aa, Homo sapiens
  Light chain CDR2
AAS

SEQ ID NO: 9652 - protein, 3 aa, Homo sapiens
  Light chain CDR2
GAS

SEQ ID NO: 9653 - protein, 3 aa, Homo sapiens
  Light chain CDR2
GAS

SEQ ID NO: 9654 - protein, 3 aa, Homo sapiens
  Light chain CDR2
AAS

SEQ ID NO: 9655 - protein, 3 aa, Homo sapiens
  Light chain CDR2
AAS

SEQ ID NO: 9656 - protein, 3 aa, Homo sapiens
  Light chain CDR2
AAS

SEQ ID NO: 9657 - protein, 3 aa, Homo sapiens
  Light chain CDR2
AAS

SEQ ID NO: 9658 - protein, 3 aa, Homo sapiens
  Light chain CDR2
AAS

SEQ ID NO: 9659 - protein, 3 aa, Homo sapiens
  Light chain CDR2
DAS

SEQ ID NO: 9660 - protein, 3 aa, Homo sapiens
  Light chain CDR2
AAS

SEQ ID NO: 9661 - protein, 3 aa, Homo sapiens
  Light chain CDR2
AAS

SEQ ID NO: 9662 - protein, 3 aa, Homo sapiens
  Light chain CDR2
AAS

SEQ ID NO: 9663 - protein, 3 aa, Homo sapiens
  Light chain CDR2
YAS

SEQ ID NO: 9664 - protein, 3 aa, Homo sapiens
  Light chain CDR2
AAS

SEQ ID NO: 9665 - protein, 3 aa, Homo sapiens
  Light chain CDR2
AAS

SEQ ID NO: 9666 - protein, 3 aa, Homo sapiens
  Light chain CDR2
AAS

SEQ ID NO: 9667 - protein, 3 aa, Homo sapiens
  Light chain CDR2
AAS

SEQ ID NO: 9668 - protein, 3 aa, Homo sapiens
  Light chain CDR2
AAS

SEQ ID NO: 9669 - protein, 3 aa, Homo sapiens
  Light chain CDR2
AAS

SEQ ID NO: 9670 - protein, 3 aa, Homo sapiens
  Light chain CDR2
DAS

SEQ ID NO: 9671 - protein, 3 aa, Homo sapiens
  Light chain CDR2
GAS

SEQ ID NO: 9672 - protein, 3 aa, Homo sapiens
  Light chain CDR2
AAS

SEQ ID NO: 9673 - protein, 3 aa, Homo sapiens
  Light chain CDR2
GAS

SEQ ID NO: 9674 - protein, 3 aa, Homo sapiens
  Light chain CDR2
TTS

SEQ ID NO: 9675 - protein, 3 aa, Homo sapiens
  Light chain CDR2
GAS

SEQ ID NO: 9676 - protein, 3 aa, Homo sapiens
  Light chain CDR2
DAS

SEQ ID NO: 9677 - protein, 3 aa, Homo sapiens
  Light chain CDR2
GAS

SEQ ID NO: 9678 - protein, 3 aa, Homo sapiens
  Light chain CDR2
GAS

SEQ ID NO: 9679 - protein, 3 aa, Homo sapiens
  Light chain CDR2
GAS

SEQ ID NO: 9680 - protein, 3 aa, Homo sapiens
  Light chain CDR2
AAS

SEQ ID NO: 9681 - protein, 3 aa, Homo sapiens
  Light chain CDR2
GAS

SEQ ID NO: 9682 - protein, 3 aa, Homo sapiens
  Light chain CDR2
GAS

SEQ ID NO: 9683 - protein, 3 aa, Homo sapiens
  Light chain CDR2
DAS

SEQ ID NO: 9684 - protein, 3 aa, Homo sapiens
  Light chain CDR2
GAS

SEQ ID NO: 9685 - protein, 3 aa, Homo sapiens
  Light chain CDR2
GAS

SEQ ID NO: 9686 - protein, 3 aa, Homo sapiens
  Light chain CDR2
KAS

SEQ ID NO: 9687 - protein, 3 aa, Homo sapiens
  Light chain CDR2
KAS

SEQ ID NO: 9688 - protein, 3 aa, Homo sapiens
  Light chain CDR2
DAS

SEQ ID NO: 9689 - protein, 3 aa, Homo sapiens
  Light chain CDR2
DAS

SEQ ID NO: 9690 - protein, 3 aa, Homo sapiens
  Light chain CDR2
AAS

SEQ ID NO: 9691 - protein, 3 aa, Homo sapiens
  Light chain CDR2
AAS

SEQ ID NO: 9692 - protein, 3 aa, Homo sapiens
  Light chain CDR2
DAS

SEQ ID NO: 9693 - protein, 3 aa, Homo sapiens
  Light chain CDR2
RAS

SEQ ID NO: 9694 - protein, 3 aa, Homo sapiens
  Light chain CDR2
GAS

SEQ ID NO: 9695 - protein, 3 aa, Homo sapiens
  Light chain CDR2
DAS

SEQ ID NO: 9696 - protein, 3 aa, Homo sapiens
  Light chain CDR2
GAS

SEQ ID NO: 9697 - protein, 3 aa, Homo sapiens
  Light chain CDR2
GAS

SEQ ID NO: 9698 - protein, 3 aa, Homo sapiens
  Light chain CDR2
GAS

SEQ ID NO: 9699 - protein, 3 aa, Homo sapiens
  Light chain CDR2
GAS

SEQ ID NO: 9700 - protein, 3 aa, Homo sapiens
  Light chain CDR2
GAS

SEQ ID NO: 9701 - protein, 3 aa, Homo sapiens
  Light chain CDR2
GAS

SEQ ID NO: 9702 - protein, 3 aa, Homo sapiens
  Light chain CDR2
KAS

SEQ ID NO: 9703 - protein, 3 aa, Homo sapiens
  Light chain CDR2
GAS

SEQ ID NO: 9704 - protein, 3 aa, Homo sapiens
  Light chain CDR2
GAS

SEQ ID NO: 9705 - protein, 3 aa, Homo sapiens
  Light chain CDR2
AAS

SEQ ID NO: 9706 - protein, 3 aa, Homo sapiens
  Light chain CDR2
AAS

SEQ ID NO: 9707 - protein, 3 aa, Homo sapiens
  Light chain CDR2
AAS

SEQ ID NO: 9708 - protein, 3 aa, Homo sapiens
  Light chain CDR2
AAS

SEQ ID NO: 9709 - protein, 3 aa, Homo sapiens
  Light chain CDR2
AAS

SEQ ID NO: 9710 - protein, 3 aa, Homo sapiens
  Light chain CDR2
AAS

SEQ ID NO: 9711 - protein, 3 aa, Homo sapiens
  Light chain CDR2
AAS

SEQ ID NO: 9712 - protein, 3 aa, Homo sapiens
  Light chain CDR2
AAS

SEQ ID NO: 9713 - protein, 3 aa, Homo sapiens
  Light chain CDR2
AAS

SEQ ID NO: 9714 - protein, 3 aa, Homo sapiens
  Light chain CDR2
AAS

SEQ ID NO: 9715 - protein, 3 aa, Homo sapiens
  Light chain CDR2
AAS

SEQ ID NO: 9716 - protein, 3 aa, Homo sapiens
  Light chain CDR2
AAS

SEQ ID NO: 9717 - protein, 3 aa, Homo sapiens
  Light chain CDR2
AAS

SEQ ID NO: 9718 - protein, 3 aa, Homo sapiens
  Light chain CDR2
AAS

SEQ ID NO: 9719 - protein, 3 aa, Homo sapiens
  Light chain CDR2
AAS

SEQ ID NO: 9720 - protein, 3 aa, Homo sapiens
  Light chain CDR2
AAS

SEQ ID NO: 9721 - protein, 3 aa, Homo sapiens
  Light chain CDR2
AAS

SEQ ID NO: 9722 - protein, 3 aa, Homo sapiens
  Light chain CDR2
AAS

SEQ ID NO: 9723 - protein, 3 aa, Homo sapiens
  Light chain CDR2
AAS

SEQ ID NO: 9724 - protein, 3 aa, Homo sapiens
  Light chain CDR2
AAS

SEQ ID NO: 9725 - protein, 3 aa, Homo sapiens
  Light chain CDR2
AAS

SEQ ID NO: 9726 - protein, 3 aa, Homo sapiens
  Light chain CDR2
AAS

SEQ ID NO: 9727 - protein, 3 aa, Homo sapiens
  Light chain CDR2
AAS

SEQ ID NO: 9728 - protein, 3 aa, Homo sapiens
  Light chain CDR2
AAS

SEQ ID NO: 9729 - protein, 3 aa, Homo sapiens
  Light chain CDR2
AAS

SEQ ID NO: 9730 - protein, 3 aa, Homo sapiens
  Light chain CDR2
AAS

SEQ ID NO: 9731 - protein, 3 aa, Homo sapiens
  Light chain CDR2
AAS

SEQ ID NO: 9732 - protein, 3 aa, Homo sapiens
  Light chain CDR2
AAS

SEQ ID NO: 9733 - protein, 3 aa, Homo sapiens
  Light chain CDR2
AAS

SEQ ID NO: 9734 - protein, 3 aa, Homo sapiens
  Light chain CDR2
AAS

SEQ ID NO: 9735 - protein, 3 aa, Homo sapiens
  Light chain CDR2
AAS

SEQ ID NO: 9736 - protein, 3 aa, Homo sapiens
  Light chain CDR2
AAS

SEQ ID NO: 9737 - protein, 3 aa, Homo sapiens
  Light chain CDR2
AAS

SEQ ID NO: 9738 - protein, 3 aa, Homo sapiens
  Light chain CDR2
AAS

SEQ ID NO: 9739 - protein, 3 aa, Homo sapiens
  Light chain CDR2
AAS

SEQ ID NO: 9740 - protein, 3 aa, Homo sapiens
  Light chain CDR2
AVS

SEQ ID NO: 9741 - protein, 3 aa, Homo sapiens
  Light chain CDR2
AAS

SEQ ID NO: 9742 - protein, 3 aa, Homo sapiens
  Light chain CDR2
AAS

SEQ ID NO: 9743 - protein, 3 aa, Homo sapiens
  Light chain CDR2
AAS

SEQ ID NO: 9744 - protein, 3 aa, Homo sapiens
  Light chain CDR2
AAS

SEQ ID NO: 9745 - protein, 3 aa, Homo sapiens
  Light chain CDR2
AAS

SEQ ID NO: 9746 - protein, 3 aa, Homo sapiens
  Light chain CDR2
AAS

SEQ ID NO: 9747 - protein, 3 aa, Homo sapiens
  Light chain CDR2
AAS

SEQ ID NO: 9748 - protein, 3 aa, Homo sapiens
  Light chain CDR2
AAS

SEQ ID NO: 9749 - protein, 3 aa, Homo sapiens
  Light chain CDR2
AAS

SEQ ID NO: 9750 - protein, 3 aa, Homo sapiens
  Light chain CDR2
GAS

SEQ ID NO: 9751 - protein, 3 aa, Homo sapiens
  Light chain CDR2
AAS

SEQ ID NO: 9752 - protein, 3 aa, Homo sapiens
  Light chain CDR2
AAS

SEQ ID NO: 9753 - protein, 3 aa, Homo sapiens
  Light chain CDR2
AAS

SEQ ID NO: 9754 - protein, 3 aa, Homo sapiens
  Light chain CDR2
AAS

SEQ ID NO: 9755 - protein, 3 aa, Homo sapiens
  Light chain CDR2
AAS

SEQ ID NO: 9756 - protein, 3 aa, Homo sapiens
  Light chain CDR2
AAS

SEQ ID NO: 9757 - protein, 3 aa, Homo sapiens
  Light chain CDR2
AAS

SEQ ID NO: 9758 - protein, 3 aa, Homo sapiens
  Light chain CDR2
AAS

SEQ ID NO: 9759 - protein, 3 aa, Homo sapiens
  Light chain CDR2
AAS

SEQ ID NO: 9760 - protein, 3 aa, Homo sapiens
  Light chain CDR2
AAS

SEQ ID NO: 9761 - protein, 3 aa, Homo sapiens
  Light chain CDR2
AAS

SEQ ID NO: 9762 - protein, 3 aa, Homo sapiens
  Light chain CDR2
AAS

SEQ ID NO: 9763 - protein, 3 aa, Homo sapiens
  Light chain CDR2
AAS

SEQ ID NO: 9764 - protein, 3 aa, Homo sapiens
  Light chain CDR2
AAS

SEQ ID NO: 9765 - protein, 3 aa, Homo sapiens
  Light chain CDR2
AAS

SEQ ID NO: 9766 - protein, 3 aa, Homo sapiens
  Light chain CDR2
AAS

SEQ ID NO: 9767 - protein, 3 aa, Homo sapiens
  Light chain CDR2
AAS

SEQ ID NO: 9768 - protein, 3 aa, Homo sapiens
  Light chain CDR2
AAS

SEQ ID NO: 9769 - protein, 3 aa, Homo sapiens
  Light chain CDR2
AAS

SEQ ID NO: 9770 - protein, 3 aa, Homo sapiens
  Light chain CDR2
AAS

SEQ ID NO: 9771 - protein, 3 aa, Homo sapiens
  Light chain CDR2
AAS

SEQ ID NO: 9772 - protein, 3 aa, Homo sapiens
  Light chain CDR2
VAS

SEQ ID NO: 9773 - protein, 3 aa, Homo sapiens
  Light chain CDR2
AAS

SEQ ID NO: 9774 - protein, 3 aa, Homo sapiens
  Light chain CDR2
AAS

SEQ ID NO: 9775 - protein, 3 aa, Homo sapiens
  Light chain CDR2
AAS

SEQ ID NO: 9776 - protein, 3 aa, Homo sapiens
  Light chain CDR2
AAS

SEQ ID NO: 9777 - protein, 3 aa, Homo sapiens
  Light chain CDR2
AAS

SEQ ID NO: 9778 - protein, 3 aa, Homo sapiens
  Light chain CDR2
AAS

SEQ ID NO: 9779 - protein, 3 aa, Homo sapiens
  Light chain CDR2
AAS

SEQ ID NO: 9780 - protein, 3 aa, Homo sapiens
  Light chain CDR2
AAS

SEQ ID NO: 9781 - protein, 3 aa, Homo sapiens
  Light chain CDR2
AAS

SEQ ID NO: 9782 - protein, 3 aa, Homo sapiens
  Light chain CDR2
AAS

SEQ ID NO: 9783 - protein, 3 aa, Homo sapiens
  Light chain CDR2
AAS

SEQ ID NO: 9784 - protein, 3 aa, Homo sapiens
  Light chain CDR2
AAS

SEQ ID NO: 9785 - protein, 3 aa, Homo sapiens
  Light chain CDR2
AAS

SEQ ID NO: 9786 - protein, 3 aa, Homo sapiens
  Light chain CDR2
KAS

SEQ ID NO: 9787 - protein, 3 aa, Homo sapiens
  Light chain CDR2
AAS

SEQ ID NO: 9788 - protein, 3 aa, Homo sapiens
  Light chain CDR2
AAS

SEQ ID NO: 9789 - protein, 3 aa, Homo sapiens
  Light chain CDR2
AAS

SEQ ID NO: 9790 - protein, 3 aa, Homo sapiens
  Light chain CDR2
AVS

SEQ ID NO: 9791 - protein, 3 aa, Homo sapiens
  Light chain CDR2
AAS

SEQ ID NO: 9792 - protein, 3 aa, Homo sapiens
  Light chain CDR2
AAS

SEQ ID NO: 9793 - protein, 3 aa, Homo sapiens
  Light chain CDR2
AAS

SEQ ID NO: 9794 - protein, 3 aa, Homo sapiens
  Light chain CDR2
GAS

SEQ ID NO: 9795 - protein, 3 aa, Homo sapiens
  Light chain CDR2
AAS

SEQ ID NO: 9796 - protein, 3 aa, Homo sapiens
  Light chain CDR2
AAS

SEQ ID NO: 9797 - protein, 3 aa, Homo sapiens
  Light chain CDR2
AAS

SEQ ID NO: 9798 - protein, 3 aa, Homo sapiens
  Light chain CDR2
AAS

SEQ ID NO: 9799 - protein, 3 aa, Homo sapiens
  Light chain CDR2
AAS

SEQ ID NO: 9800 - protein, 3 aa, Homo sapiens
  Light chain CDR2
AAS

SEQ ID NO: 9801 - protein, 3 aa, Homo sapiens
  Light chain CDR2
AAS

SEQ ID NO: 9802 - protein, 3 aa, Homo sapiens
  Light chain CDR2
AAS

SEQ ID NO: 9803 - protein, 3 aa, Homo sapiens
  Light chain CDR2
AAS

SEQ ID NO: 9804 - protein, 3 aa, Homo sapiens
  Light chain CDR2
AAS

SEQ ID NO: 9805 - protein, 3 aa, Homo sapiens
  Light chain CDR2
KAS

SEQ ID NO: 9806 - protein, 3 aa, Homo sapiens
  Light chain CDR2
DAS

SEQ ID NO: 9807 - protein, 3 aa, Homo sapiens
  Light chain CDR2
AAS

SEQ ID NO: 9808 - protein, 3 aa, Homo sapiens
  Light chain CDR2
AAS

SEQ ID NO: 9809 - protein, 3 aa, Homo sapiens
  Light chain CDR2
AAS

SEQ ID NO: 9810 - protein, 3 aa, Homo sapiens
  Light chain CDR2
GAS

SEQ ID NO: 9811 - protein, 3 aa, Homo sapiens
  Light chain CDR2
GAS

SEQ ID NO: 9812 - protein, 3 aa, Homo sapiens
  Light chain CDR2
GAS

SEQ ID NO: 9813 - protein, 3 aa, Homo sapiens
  Light chain CDR2
GAS

SEQ ID NO: 9814 - protein, 3 aa, Homo sapiens
  Light chain CDR2
AAS

SEQ ID NO: 9815 - protein, 3 aa, Homo sapiens
  Light chain CDR2
AAS

SEQ ID NO: 9816 - protein, 3 aa, Homo sapiens
  Light chain CDR2
AVS

SEQ ID NO: 9817 - protein, 3 aa, Homo sapiens
  Light chain CDR2
VAS

SEQ ID NO: 9818 - protein, 3 aa, Homo sapiens
  Light chain CDR2
AAS

SEQ ID NO: 9819 - protein, 3 aa, Homo sapiens
  Light chain CDR2
KAS

SEQ ID NO: 9820 - protein, 3 aa, Homo sapiens
  Light chain CDR2
DAS

SEQ ID NO: 9821 - protein, 3 aa, Homo sapiens
  Light chain CDR2
AAS

SEQ ID NO: 9822 - protein, 3 aa, Homo sapiens
  Light chain CDR2
AAS

SEQ ID NO: 9823 - protein, 3 aa, Homo sapiens
  Light chain CDR2
KAS

SEQ ID NO: 9824 - protein, 3 aa, Homo sapiens
  Light chain CDR2
AAS

SEQ ID NO: 9825 - protein, 3 aa, Homo sapiens
  Light chain CDR2
GSS

SEQ ID NO: 9826 - protein, 3 aa, Homo sapiens
  Light chain CDR2
AAS

SEQ ID NO: 9827 - protein, 3 aa, Homo sapiens
  Light chain CDR2
VAS

SEQ ID NO: 9828 - protein, 3 aa, Homo sapiens
  Light chain CDR2
AAS

SEQ ID NO: 9829 - protein, 3 aa, Homo sapiens
  Light chain CDR2
GAS

SEQ ID NO: 9830 - protein, 3 aa, Homo sapiens
  Light chain CDR2
VAS

SEQ ID NO: 9831 - protein, 3 aa, Homo sapiens
  Light chain CDR2
VAS

SEQ ID NO: 9832 - protein, 3 aa, Homo sapiens
  Light chain CDR2
GSS

SEQ ID NO: 9833 - protein, 3 aa, Homo sapiens
  Light chain CDR2
YAS

SEQ ID NO: 9834 - protein, 3 aa, Homo sapiens
  Light chain CDR2
YAS

SEQ ID NO: 9835 - protein, 3 aa, Homo sapiens
  Light chain CDR2
GSS

SEQ ID NO: 9836 - protein, 3 aa, Homo sapiens
  Light chain CDR2
GSS

SEQ ID NO: 9837 - protein, 3 aa, Homo sapiens
  Light chain CDR2
GSS

SEQ ID NO: 9838 - protein, 3 aa, Homo sapiens
  Light chain CDR2
GSS

SEQ ID NO: 9839 - protein, 3 aa, Homo sapiens
  Light chain CDR2
AAS

SEQ ID NO: 9840 - protein, 3 aa, Homo sapiens
  Light chain CDR2
GAS

SEQ ID NO: 9841 - protein, 3 aa, Homo sapiens
  Light chain CDR2
GSS

SEQ ID NO: 9842 - protein, 3 aa, Homo sapiens
  Light chain CDR2
GSS

SEQ ID NO: 9843 - protein, 3 aa, Homo sapiens
  Light chain CDR2
GSS

SEQ ID NO: 9844 - protein, 3 aa, Homo sapiens
  Light chain CDR2
GSS

SEQ ID NO: 9845 - protein, 3 aa, Homo sapiens
  Light chain CDR2
GSS

SEQ ID NO: 9846 - protein, 3 aa, Homo sapiens
  Light chain CDR2
GSS

SEQ ID NO: 9847 - protein, 3 aa, Homo sapiens
  Light chain CDR2
GSS

SEQ ID NO: 9848 - protein, 3 aa, Homo sapiens
  Light chain CDR2
GSS

SEQ ID NO: 9849 - protein, 3 aa, Homo sapiens
  Light chain CDR2
GSS

SEQ ID NO: 9850 - protein, 3 aa, Homo sapiens
  Light chain CDR2
KVS

SEQ ID NO: 9851 - protein, 3 aa, Homo sapiens
  Light chain CDR2
GSS

SEQ ID NO: 9852 - protein, 3 aa, Homo sapiens
  Light chain CDR2
VAS

SEQ ID NO: 9853 - protein, 3 aa, Homo sapiens
  Light chain CDR2
GSS

SEQ ID NO: 9854 - protein, 3 aa, Homo sapiens
  Light chain CDR2
GAS

SEQ ID NO: 9855 - protein, 3 aa, Homo sapiens
  Light chain CDR2
AAS

SEQ ID NO: 9856 - protein, 3 aa, Homo sapiens
  Light chain CDR2
GAS

SEQ ID NO: 9857 - protein, 3 aa, Homo sapiens
  Light chain CDR2
DAS

SEQ ID NO: 9858 - protein, 3 aa, Homo sapiens
  Light chain CDR2
AAS

SEQ ID NO: 9859 - protein, 3 aa, Homo sapiens
  Light chain CDR2
AAS

SEQ ID NO: 9860 - protein, 3 aa, Homo sapiens
  Light chain CDR2
AAS

SEQ ID NO: 9861 - protein, 3 aa, Homo sapiens
  Light chain CDR2
GAS

SEQ ID NO: 9862 - protein, 3 aa, Homo sapiens
  Light chain CDR2
AAS

SEQ ID NO: 9863 - protein, 3 aa, Homo sapiens
  Light chain CDR2
DAS

SEQ ID NO: 9864 - protein, 3 aa, Homo sapiens
  Light chain CDR2
AAS

SEQ ID NO: 9865 - protein, 3 aa, Homo sapiens
  Light chain CDR2
AAS

SEQ ID NO: 9866 - protein, 3 aa, Homo sapiens
  Light chain CDR2
AAS

SEQ ID NO: 9867 - protein, 3 aa, Homo sapiens
  Light chain CDR2
YAS

SEQ ID NO: 9868 - protein, 3 aa, Homo sapiens
  Light chain CDR2
GAS

SEQ ID NO: 9869 - protein, 3 aa, Homo sapiens
  Light chain CDR2
AAS

SEQ ID NO: 9870 - protein, 3 aa, Homo sapiens
  Light chain CDR2
AAS

SEQ ID NO: 9871 - protein, 3 aa, Homo sapiens
  Light chain CDR2
AAS

SEQ ID NO: 9872 - protein, 3 aa, Homo sapiens
  Light chain CDR2
DAS

SEQ ID NO: 9873 - protein, 3 aa, Homo sapiens
  Light chain CDR2
AAS

SEQ ID NO: 9874 - protein, 3 aa, Homo sapiens
  Light chain CDR2
DAS

SEQ ID NO: 9875 - protein, 3 aa, Homo sapiens
  Light chain CDR2
AAS

SEQ ID NO: 9876 - protein, 3 aa, Homo sapiens
  Light chain CDR2
DAS

SEQ ID NO: 9877 - protein, 3 aa, Homo sapiens
  Light chain CDR2
YAS

SEQ ID NO: 9878 - protein, 3 aa, Homo sapiens
  Light chain CDR2
AAS

SEQ ID NO: 9879 - protein, 3 aa, Homo sapiens
  Light chain CDR2
GAS

SEQ ID NO: 9880 - protein, 3 aa, Homo sapiens
  Light chain CDR2
AAS

SEQ ID NO: 9881 - protein, 3 aa, Homo sapiens
  Light chain CDR2
AAS

SEQ ID NO: 9882 - protein, 3 aa, Homo sapiens
  Light chain CDR2
VAS

SEQ ID NO: 9883 - protein, 3 aa, Homo sapiens
  Light chain CDR2
VAS

SEQ ID NO: 9884 - protein, 3 aa, Homo sapiens
  Light chain CDR2
AAS

SEQ ID NO: 9885 - protein, 3 aa, Homo sapiens
  Light chain CDR2
AAS

SEQ ID NO: 9886 - protein, 3 aa, Homo sapiens
  Light chain CDR2
AAS

SEQ ID NO: 9887 - protein, 3 aa, Homo sapiens
  Light chain CDR2
VAS

SEQ ID NO: 9888 - protein, 3 aa, Homo sapiens
  Light chain CDR2
VAS

SEQ ID NO: 9889 - protein, 3 aa, Homo sapiens
  Light chain CDR2
AAS

SEQ ID NO: 9890 - protein, 3 aa, Homo sapiens
  Light chain CDR2
DAS

SEQ ID NO: 9891 - protein, 3 aa, Homo sapiens
  Light chain CDR2
YAS

SEQ ID NO: 9892 - protein, 3 aa, Homo sapiens
  Light chain CDR2
YAS

SEQ ID NO: 9893 - protein, 3 aa, Homo sapiens
  Light chain CDR2
YAS

SEQ ID NO: 9894 - protein, 3 aa, Homo sapiens
  Light chain CDR2
YAS

SEQ ID NO: 9895 - protein, 3 aa, Homo sapiens
  Light chain CDR2
YAS

SEQ ID NO: 9896 - protein, 3 aa, Homo sapiens
  Light chain CDR2
YAS

SEQ ID NO: 9897 - protein, 3 aa, Homo sapiens
  Light chain CDR2
YAS

SEQ ID NO: 9898 - protein, 3 aa, Homo sapiens
  Light chain CDR2
FAS

SEQ ID NO: 9899 - protein, 3 aa, Homo sapiens
  Light chain CDR2
FAS

SEQ ID NO: 9900 - protein, 3 aa, Homo sapiens
  Light chain CDR2
YAS

SEQ ID NO: 9901 - protein, 3 aa, Homo sapiens
  Light chain CDR2
YAS

SEQ ID NO: 9902 - protein, 3 aa, Homo sapiens
  Light chain CDR2
YAS

SEQ ID NO: 9903 - protein, 3 aa, Homo sapiens
  Light chain CDR2
YAS

SEQ ID NO: 9904 - protein, 3 aa, Homo sapiens
  Light chain CDR2
YAS

SEQ ID NO: 9905 - protein, 3 aa, Homo sapiens
  Light chain CDR2
YAS

SEQ ID NO: 9906 - protein, 3 aa, Homo sapiens
  Light chain CDR2
YAS

SEQ ID NO: 9907 - protein, 3 aa, Homo sapiens
  Light chain CDR2
AAS

SEQ ID NO: 9908 - protein, 3 aa, Homo sapiens
  Light chain CDR2
VAS

SEQ ID NO: 9909 - protein, 3 aa, Homo sapiens
  Light chain CDR2
AAS

SEQ ID NO: 9910 - protein, 3 aa, Homo sapiens
  Light chain CDR2
VAS

SEQ ID NO: 9911 - protein, 3 aa, Homo sapiens
  Light chain CDR2
VAS

SEQ ID NO: 9912 - protein, 3 aa, Homo sapiens
  Light chain CDR2
AAS

SEQ ID NO: 9913 - protein, 3 aa, Homo sapiens
  Light chain CDR2
AAS

SEQ ID NO: 9914 - protein, 3 aa, Homo sapiens
  Light chain CDR2
AAS

SEQ ID NO: 9915 - protein, 3 aa, Homo sapiens
  Light chain CDR2
AAS

SEQ ID NO: 9916 - protein, 3 aa, Homo sapiens
  Light chain CDR2
AAS

SEQ ID NO: 9917 - protein, 3 aa, Homo sapiens
  Light chain CDR2
AAS

SEQ ID NO: 9918 - protein, 3 aa, Homo sapiens
  Light chain CDR2
AAS

SEQ ID NO: 9919 - protein, 3 aa, Homo sapiens
  Light chain CDR2
AAS

SEQ ID NO: 9920 - protein, 3 aa, Homo sapiens
  Light chain CDR2
AAS

SEQ ID NO: 9921 - protein, 3 aa, Homo sapiens
  Light chain CDR2
AAS

SEQ ID NO: 9922 - protein, 3 aa, Homo sapiens
  Light chain CDR2
AAS

SEQ ID NO: 9923 - protein, 3 aa, Homo sapiens
  Light chain CDR2
AAS

SEQ ID NO: 9924 - protein, 3 aa, Homo sapiens
  Light chain CDR2
VAS

SEQ ID NO: 9925 - protein, 3 aa, Homo sapiens
  Light chain CDR2
AAS

SEQ ID NO: 9926 - protein, 3 aa, Homo sapiens
  Light chain CDR2
AAS

SEQ ID NO: 9927 - protein, 3 aa, Homo sapiens
  Light chain CDR2
VAS

SEQ ID NO: 9928 - protein, 3 aa, Homo sapiens
  Light chain CDR2
AAS

SEQ ID NO: 9929 - protein, 3 aa, Homo sapiens
  Light chain CDR2
VAS

SEQ ID NO: 9930 - protein, 3 aa, Homo sapiens
  Light chain CDR2
VAS

SEQ ID NO: 9931 - protein, 3 aa, Homo sapiens
  Light chain CDR2
VAS

SEQ ID NO: 9932 - protein, 3 aa, Homo sapiens
  Light chain CDR2
AAS

SEQ ID NO: 9933 - protein, 3 aa, Homo sapiens
  Light chain CDR2
VAS

SEQ ID NO: 9934 - protein, 3 aa, Homo sapiens
  Light chain CDR2
VAS

SEQ ID NO: 9935 - protein, 3 aa, Homo sapiens
  Light chain CDR2
VAS

SEQ ID NO: 9936 - protein, 3 aa, Homo sapiens
  Light chain CDR2
VAS

SEQ ID NO: 9937 - protein, 3 aa, Homo sapiens
  Light chain CDR2
VAS

SEQ ID NO: 9938 - protein, 3 aa, Homo sapiens
  Light chain CDR2
VAS

SEQ ID NO: 9939 - protein, 3 aa, Homo sapiens
  Light chain CDR2
VAS

SEQ ID NO: 9940 - protein, 3 aa, Homo sapiens
  Light chain CDR2
AAS

SEQ ID NO: 9941 - protein, 3 aa, Homo sapiens
  Light chain CDR2
AAS

SEQ ID NO: 9942 - protein, 3 aa, Homo sapiens
  Light chain CDR2
AAS

SEQ ID NO: 9943 - protein, 3 aa, Homo sapiens
  Light chain CDR2
AAS

SEQ ID NO: 9944 - protein, 3 aa, Homo sapiens
  Light chain CDR2
AAS

SEQ ID NO: 9945 - protein, 3 aa, Homo sapiens
  Light chain CDR2
AAS

SEQ ID NO: 9946 - protein, 3 aa, Homo sapiens
  Light chain CDR2
AAS

SEQ ID NO: 9947 - protein, 3 aa, Homo sapiens
  Light chain CDR2
AAS

SEQ ID NO: 9948 - protein, 3 aa, Homo sapiens
  Light chain CDR2
AAS

SEQ ID NO: 9949 - protein, 3 aa, Homo sapiens
  Light chain CDR2
AAS

SEQ ID NO: 9950 - protein, 3 aa, Homo sapiens
  Light chain CDR2
AAS

SEQ ID NO: 9951 - protein, 3 aa, Homo sapiens
  Light chain CDR2
AAS

SEQ ID NO: 9952 - protein, 3 aa, Homo sapiens
  Light chain CDR2
AAS

SEQ ID NO: 9953 - protein, 3 aa, Homo sapiens
  Light chain CDR2
AAS

SEQ ID NO: 9954 - protein, 3 aa, Homo sapiens
  Light chain CDR2
VAS

SEQ ID NO: 9955 - protein, 3 aa, Homo sapiens
  Light chain CDR2
VAS

SEQ ID NO: 9956 - protein, 3 aa, Homo sapiens
  Light chain CDR2
VAS

SEQ ID NO: 9957 - protein, 3 aa, Homo sapiens
  Light chain CDR2
AAS

SEQ ID NO: 9958 - protein, 3 aa, Homo sapiens
  Light chain CDR2
AAS

SEQ ID NO: 9959 - protein, 3 aa, Homo sapiens
  Light chain CDR2
AAS

SEQ ID NO: 9960 - protein, 3 aa, Homo sapiens
  Light chain CDR2
AAS

SEQ ID NO: 9961 - protein, 3 aa, Homo sapiens
  Light chain CDR2
AAS

SEQ ID NO: 9962 - protein, 3 aa, Homo sapiens
  Light chain CDR2
AAS

SEQ ID NO: 9963 - protein, 3 aa, Homo sapiens
  Light chain CDR2
AAS

SEQ ID NO: 9964 - protein, 3 aa, Homo sapiens
  Light chain CDR2
AAS

SEQ ID NO: 9965 - protein, 3 aa, Homo sapiens
  Light chain CDR2
AAS

SEQ ID NO: 9966 - protein, 3 aa, Homo sapiens
  Light chain CDR2
AAS

SEQ ID NO: 9967 - protein, 3 aa, Homo sapiens
  Light chain CDR2
VAS

SEQ ID NO: 9968 - protein, 3 aa, Homo sapiens
  Light chain CDR2
VAS

SEQ ID NO: 9969 - protein, 3 aa, Homo sapiens
  Light chain CDR2
AAS

SEQ ID NO: 9970 - protein, 3 aa, Homo sapiens
  Light chain CDR2
VAS

SEQ ID NO: 9971 - protein, 3 aa, Homo sapiens
  Light chain CDR2
AAS

SEQ ID NO: 9972 - protein, 3 aa, Homo sapiens
  Light chain CDR2
AAS

SEQ ID NO: 9973 - protein, 3 aa, Homo sapiens
  Light chain CDR2
VAS

SEQ ID NO: 9974 - protein, 3 aa, Homo sapiens
  Light chain CDR2
AAS

SEQ ID NO: 9975 - protein, 3 aa, Homo sapiens
  Light chain CDR2
VAS

SEQ ID NO: 9976 - protein, 3 aa, Homo sapiens
  Light chain CDR2
AAS

SEQ ID NO: 9977 - protein, 3 aa, Homo sapiens
  Light chain CDR2
AAS

SEQ ID NO: 9978 - protein, 3 aa, Homo sapiens
  Light chain CDR2
AAS

SEQ ID NO: 9979 - protein, 3 aa, Homo sapiens
  Light chain CDR2
AAS

SEQ ID NO: 9980 - protein, 3 aa, Homo sapiens
  Light chain CDR2
AAS

SEQ ID NO: 9981 - protein, 3 aa, Homo sapiens
  Light chain CDR2
AAS

SEQ ID NO: 9982 - protein, 3 aa, Homo sapiens
  Light chain CDR2
AAS

SEQ ID NO: 9983 - protein, 3 aa, Homo sapiens
  Light chain CDR2
AAS

SEQ ID NO: 9984 - protein, 3 aa, Homo sapiens
  Light chain CDR2
AAS

SEQ ID NO: 9985 - protein, 3 aa, Homo sapiens
  Light chain CDR2
AAS

SEQ ID NO: 9986 - protein, 3 aa, Homo sapiens
  Light chain CDR2
AAS

SEQ ID NO: 9987 - protein, 3 aa, Homo sapiens
  Light chain CDR2
AAS

SEQ ID NO: 9988 - protein, 3 aa, Homo sapiens
  Light chain CDR2
AAS

SEQ ID NO: 9989 - protein, 3 aa, Homo sapiens
  Light chain CDR2
AAS

SEQ ID NO: 9990 - protein, 3 aa, Homo sapiens
  Light chain CDR2
AAS

SEQ ID NO: 9991 - protein, 3 aa, Homo sapiens
  Light chain CDR2
AAS

SEQ ID NO: 9992 - protein, 3 aa, Homo sapiens
  Light chain CDR2
AAS

SEQ ID NO: 9993 - protein, 3 aa, Homo sapiens
  Light chain CDR2
AAS

SEQ ID NO: 9994 - protein, 3 aa, Homo sapiens
  Light chain CDR2
AAS

SEQ ID NO: 9995 - protein, 3 aa, Homo sapiens
  Light chain CDR2
AAS

SEQ ID NO: 9996 - protein, 3 aa, Homo sapiens
  Light chain CDR2
AAS

SEQ ID NO: 9997 - protein, 3 aa, Homo sapiens
  Light chain CDR2
AAS

SEQ ID NO: 9998 - protein, 3 aa, Homo sapiens
  Light chain CDR2
AAS

SEQ ID NO: 9999 - protein, 3 aa, Homo sapiens
  Light chain CDR2
AAS

SEQ ID NO: 10000 - protein, 3 aa, Homo sapiens
  Light chain CDR2
AAS

SEQ ID NO: 10001 - protein, 3 aa, Homo sapiens
  Light chain CDR2
AAS

SEQ ID NO: 10002 - protein, 3 aa, Homo sapiens
  Light chain CDR2
AAS

SEQ ID NO: 10003 - protein, 3 aa, Homo sapiens
  Light chain CDR2
AAS

SEQ ID NO: 10004 - protein, 3 aa, Homo sapiens
  Light chain CDR2
AAS

SEQ ID NO: 10005 - protein, 3 aa, Homo sapiens
  Light chain CDR2
DAS

SEQ ID NO: 10006 - protein, 3 aa, Homo sapiens
  Light chain CDR2
AAS

SEQ ID NO: 10007 - protein, 3 aa, Homo sapiens
  Light chain CDR2
GAS

SEQ ID NO: 10008 - protein, 3 aa, Homo sapiens
  Light chain CDR2
DAS

SEQ ID NO: 10009 - protein, 3 aa, Homo sapiens
  Light chain CDR2
AAS

SEQ ID NO: 10010 - protein, 3 aa, Homo sapiens
  Light chain CDR2
AAS

SEQ ID NO: 10011 - protein, 3 aa, Homo sapiens
  Light chain CDR2
GAS

SEQ ID NO: 10012 - protein, 3 aa, Homo sapiens
  Light chain CDR2
DAS

SEQ ID NO: 10013 - protein, 3 aa, Homo sapiens
  Light chain CDR2
GAS

SEQ ID NO: 10014 - protein, 3 aa, Homo sapiens
  Light chain CDR2
DAS

SEQ ID NO: 10015 - protein, 3 aa, Homo sapiens
  Light chain CDR2
DAS

SEQ ID NO: 10016 - protein, 3 aa, Homo sapiens
  Light chain CDR2
DAS

SEQ ID NO: 10017 - protein, 3 aa, Homo sapiens
  Light chain CDR2
DAS

SEQ ID NO: 10018 - protein, 3 aa, Homo sapiens
  Light chain CDR2
DAS

SEQ ID NO: 10019 - protein, 3 aa, Homo sapiens
  Light chain CDR2
DAS

SEQ ID NO: 10020 - protein, 3 aa, Homo sapiens
  Light chain CDR2
DAS

SEQ ID NO: 10021 - protein, 3 aa, Homo sapiens
  Light chain CDR2
AAS

SEQ ID NO: 10022 - protein, 3 aa, Homo sapiens
  Light chain CDR2
DAS

SEQ ID NO: 10023 - protein, 3 aa, Homo sapiens
  Light chain CDR2
DAS

SEQ ID NO: 10024 - protein, 3 aa, Homo sapiens
  Light chain CDR2
DAS

SEQ ID NO: 10025 - protein, 3 aa, Homo sapiens
  Light chain CDR2
DAS

SEQ ID NO: 10026 - protein, 3 aa, Homo sapiens
  Light chain CDR2
DAS

SEQ ID NO: 10027 - protein, 3 aa, Homo sapiens
  Light chain CDR2
DAS

SEQ ID NO: 10028 - protein, 3 aa, Homo sapiens
  Light chain CDR2
DAS

SEQ ID NO: 10029 - protein, 3 aa, Homo sapiens
  Light chain CDR2
DAS

SEQ ID NO: 10030 - protein, 3 aa, Homo sapiens
  Light chain CDR2
DAS

SEQ ID NO: 10031 - protein, 3 aa, Homo sapiens
  Light chain CDR2
DAS

SEQ ID NO: 10032 - protein, 3 aa, Homo sapiens
  Light chain CDR2
AAS

SEQ ID NO: 10033 - protein, 3 aa, Homo sapiens
  Light chain CDR2
AAS

SEQ ID NO: 10034 - protein, 3 aa, Homo sapiens
  Light chain CDR2
KAS

SEQ ID NO: 10035 - protein, 3 aa, Homo sapiens
  Light chain CDR2
AAS

SEQ ID NO: 10036 - protein, 3 aa, Homo sapiens
  Light chain CDR2
AAS

SEQ ID NO: 10037 - protein, 3 aa, Homo sapiens
  Light chain CDR2
AAS

SEQ ID NO: 10038 - protein, 3 aa, Homo sapiens
  Light chain CDR2
AAS

SEQ ID NO: 10039 - protein, 3 aa, Homo sapiens
  Light chain CDR2
AAS

SEQ ID NO: 10040 - protein, 3 aa, Homo sapiens
  Light chain CDR2
AAS

SEQ ID NO: 10041 - protein, 3 aa, Homo sapiens
  Light chain CDR2
DAS

SEQ ID NO: 10042 - protein, 3 aa, Homo sapiens
  Light chain CDR2
DAS

SEQ ID NO: 10043 - protein, 3 aa, Homo sapiens
  Light chain CDR2
DAS

SEQ ID NO: 10044 - protein, 3 aa, Homo sapiens
  Light chain CDR2
DAS

SEQ ID NO: 10045 - protein, 3 aa, Homo sapiens
  Light chain CDR2
DAS

SEQ ID NO: 10046 - protein, 3 aa, Homo sapiens
  Light chain CDR2
DAS

SEQ ID NO: 10047 - protein, 3 aa, Homo sapiens
  Light chain CDR2
DAS

SEQ ID NO: 10048 - protein, 3 aa, Homo sapiens
  Light chain CDR2
DAS

SEQ ID NO: 10049 - protein, 3 aa, Homo sapiens
  Light chain CDR2
DAS

SEQ ID NO: 10050 - protein, 3 aa, Homo sapiens
  Light chain CDR2
DAS

SEQ ID NO: 10051 - protein, 3 aa, Homo sapiens
  Light chain CDR2
DAS

SEQ ID NO: 10052 - protein, 3 aa, Homo sapiens
  Light chain CDR2
DAS

SEQ ID NO: 10053 - protein, 3 aa, Homo sapiens
  Light chain CDR2
AAS

SEQ ID NO: 10054 - protein, 3 aa, Homo sapiens
  Light chain CDR2
GAS

SEQ ID NO: 10055 - protein, 3 aa, Homo sapiens
  Light chain CDR2
DAS

SEQ ID NO: 10056 - protein, 3 aa, Homo sapiens
  Light chain CDR2
AAS

SEQ ID NO: 10057 - protein, 3 aa, Homo sapiens
  Light chain CDR2
GAS

SEQ ID NO: 10058 - protein, 3 aa, Homo sapiens
  Light chain CDR2
AAS

SEQ ID NO: 10059 - protein, 3 aa, Homo sapiens
  Light chain CDR2
GAS

SEQ ID NO: 10060 - protein, 3 aa, Homo sapiens
  Light chain CDR2
GAS

SEQ ID NO: 10061 - protein, 3 aa, Homo sapiens
  Light chain CDR2
GAS

SEQ ID NO: 10062 - protein, 3 aa, Homo sapiens
  Light chain CDR2
GAS

SEQ ID NO: 10063 - protein, 3 aa, Homo sapiens
  Light chain CDR2
GAS

SEQ ID NO: 10064 - protein, 3 aa, Homo sapiens
  Light chain CDR2
AAS

SEQ ID NO: 10065 - protein, 3 aa, Homo sapiens
  Light chain CDR2
AAS

SEQ ID NO: 10066 - protein, 3 aa, Homo sapiens
  Light chain CDR2
AAS

SEQ ID NO: 10067 - protein, 3 aa, Homo sapiens
  Light chain CDR2
AAS

SEQ ID NO: 10068 - protein, 3 aa, Homo sapiens
  Light chain CDR2
AAS

SEQ ID NO: 10069 - protein, 3 aa, Homo sapiens
  Light chain CDR2
AAS

SEQ ID NO: 10070 - protein, 3 aa, Homo sapiens
  Light chain CDR2
AAS

SEQ ID NO: 10071 - protein, 3 aa, Homo sapiens
  Light chain CDR2
AAS

SEQ ID NO: 10072 - protein, 3 aa, Homo sapiens
  Light chain CDR2
AAS

SEQ ID NO: 10073 - protein, 3 aa, Homo sapiens
  Light chain CDR2
AAS

SEQ ID NO: 10074 - protein, 3 aa, Homo sapiens
  Light chain CDR2
AAS

SEQ ID NO: 10075 - protein, 3 aa, Homo sapiens
  Light chain CDR2
AAS

SEQ ID NO: 10076 - protein, 3 aa, Homo sapiens
  Light chain CDR2
AAS

SEQ ID NO: 10077 - protein, 3 aa, Homo sapiens
  Light chain CDR2
AAS

SEQ ID NO: 10078 - protein, 3 aa, Homo sapiens
  Light chain CDR2
AAS

SEQ ID NO: 10079 - protein, 3 aa, Homo sapiens
  Light chain CDR2
AAS

SEQ ID NO: 10080 - protein, 3 aa, Homo sapiens
  Light chain CDR2
AAS

SEQ ID NO: 10081 - protein, 3 aa, Homo sapiens
  Light chain CDR2
AAS

SEQ ID NO: 10082 - protein, 3 aa, Homo sapiens
  Light chain CDR2
AAS

SEQ ID NO: 10083 - protein, 3 aa, Homo sapiens
  Light chain CDR2
AAS

SEQ ID NO: 10084 - protein, 3 aa, Homo sapiens
  Light chain CDR2
AAS

SEQ ID NO: 10085 - protein, 3 aa, Homo sapiens
  Light chain CDR2
AAS

SEQ ID NO: 10086 - protein, 3 aa, Homo sapiens
  Light chain CDR2
AAS

SEQ ID NO: 10087 - protein, 3 aa, Homo sapiens
  Light chain CDR2
AAS

SEQ ID NO: 10088 - protein, 3 aa, Homo sapiens
  Light chain CDR2
KAS

SEQ ID NO: 10089 - protein, 3 aa, Homo sapiens
  Light chain CDR2
AAS

SEQ ID NO: 10090 - protein, 3 aa, Homo sapiens
  Light chain CDR2
AAS

SEQ ID NO: 10091 - protein, 3 aa, Homo sapiens
  Light chain CDR2
YAS

SEQ ID NO: 10092 - protein, 9 aa, Homo sapiens
  Light chain CDR3
QQLNSYPYT

SEQ ID NO: 10093 - protein, 9 aa, Homo sapiens
  Light chain CDR3
QQYNSYPYT

SEQ ID NO: 10094 - protein, 9 aa, Homo sapiens
  Light chain CDR3
QQLNSYPRT

SEQ ID NO: 10095 - protein, 9 aa, Homo sapiens
  Light chain CDR3
QQYNSYPLT

SEQ ID NO: 10096 - protein, 9 aa, Homo sapiens
  Light chain CDR3
QQLNSYPYT

SEQ ID NO: 10097 - protein, 8 aa, Homo sapiens
  Light chain CDR3
QQYGSSPT

SEQ ID NO: 10098 - protein, 9 aa, Homo sapiens
  Light chain CDR3
HQSSSLPHT

SEQ ID NO: 10099 - protein, 9 aa, Homo sapiens
  Light chain CDR3
QQLNSYPYT

SEQ ID NO: 10100 - protein, 9 aa, Homo sapiens
  Light chain CDR3
LQHNSYPYT

SEQ ID NO: 10101 - protein, 9 aa, Homo sapiens
  Light chain CDR3
QQYGSSPYT

SEQ ID NO: 10102 - protein, 9 aa, Homo sapiens
  Light chain CDR3
QQYKSYPLT

SEQ ID NO: 10103 - protein, 9 aa, Homo sapiens
  Light chain CDR3
LQHNSYPWT

SEQ ID NO: 10104 - protein, 9 aa, Homo sapiens
  Light chain CDR3
LQDYNFPRT

SEQ ID NO: 10105 - protein, 9 aa, Homo sapiens
  Light chain CDR3
QQYNSYPLT

SEQ ID NO: 10106 - protein, 9 aa, Homo sapiens
  Light chain CDR3
QQLNSYPYT

SEQ ID NO: 10107 - protein, 9 aa, Homo sapiens
  Light chain CDR3
QQLNSYPYT

SEQ ID NO: 10108 - protein, 9 aa, Homo sapiens
  Light chain CDR3
QQSYSTPYT

SEQ ID NO: 10109 - protein, 9 aa, Homo sapiens
  Light chain CDR3
QQLNSYPFT

SEQ ID NO: 10110 - protein, 9 aa, Homo sapiens
  Light chain CDR3
QQYNSYPYT

SEQ ID NO: 10111 - protein, 9 aa, Homo sapiens
  Light chain CDR3
QQLNSYPRT

SEQ ID NO: 10112 - protein, 9 aa, Homo sapiens
  Light chain CDR3
QQLNSYPYT

SEQ ID NO: 10113 - protein, 9 aa, Homo sapiens
  Light chain CDR3
QQYNSYPLT

SEQ ID NO: 10114 - protein, 9 aa, Homo sapiens
  Light chain CDR3
QQLNSYPYT

SEQ ID NO: 10115 - protein, 8 aa, Homo sapiens
  Light chain CDR3
QQYGSSPT

SEQ ID NO: 10116 - protein, 9 aa, Homo sapiens
  Light chain CDR3
HQSSSLPHT

SEQ ID NO: 10117 - protein, 9 aa, Homo sapiens
  Light chain CDR3
QQLNSYPYT

SEQ ID NO: 10118 - protein, 9 aa, Homo sapiens
  Light chain CDR3
QQYNSYPYT

SEQ ID NO: 10119 - protein, 9 aa, Homo sapiens
  Light chain CDR3
QQYDNLPLT

SEQ ID NO: 10120 - protein, 9 aa, Homo sapiens
  Light chain CDR3
QQLNSYPYT

SEQ ID NO: 10121 - protein, 8 aa, Homo sapiens
  Light chain CDR3
QQYGSSPT

SEQ ID NO: 10122 - protein, 9 aa, Homo sapiens
  Light chain CDR3
QQLNSYPYT

SEQ ID NO: 10123 - protein, 9 aa, Homo sapiens
  Light chain CDR3
HQSSSLPYT

SEQ ID NO: 10124 - protein, 9 aa, Homo sapiens
  Light chain CDR3
QQLNSYPYT

SEQ ID NO: 10125 - protein, 9 aa, Homo sapiens
  Light chain CDR3
QQLNSYPRT

SEQ ID NO: 10126 - protein, 9 aa, Homo sapiens
  Light chain CDR3
QQLNSYPYT

SEQ ID NO: 10127 - protein, 9 aa, Homo sapiens
  Light chain CDR3
QQLNSYPYT

SEQ ID NO: 10128 - protein, 9 aa, Homo sapiens
  Light chain CDR3
QQYTSYPYT

SEQ ID NO: 10129 - protein, 9 aa, Homo sapiens
  Light chain CDR3
QQYNSYPFT

SEQ ID NO: 10130 - protein, 9 aa, Homo sapiens
  Light chain CDR3
QQLNSYPRT

SEQ ID NO: 10131 - protein, 9 aa, Homo sapiens
  Light chain CDR3
QQYGSSPYT

SEQ ID NO: 10132 - protein, 9 aa, Homo sapiens
  Light chain CDR3
QQYGSSPRT

SEQ ID NO: 10133 - protein, 8 aa, Homo sapiens
  Light chain CDR3
QQYGSSPT

SEQ ID NO: 10134 - protein, 9 aa, Homo sapiens
  Light chain CDR3
QQYNSYPLT

SEQ ID NO: 10135 - protein, 9 aa, Homo sapiens
  Light chain CDR3
QQYKSYPLT

SEQ ID NO: 10136 - protein, 9 aa, Homo sapiens
  Light chain CDR3
LQHNSYPFT

SEQ ID NO: 10137 - protein, 9 aa, Homo sapiens
  Light chain CDR3
LQDYNYPWT

SEQ ID NO: 10138 - protein, 9 aa, Homo sapiens
  Light chain CDR3
HQSSSLPHT

SEQ ID NO: 10139 - protein, 9 aa, Homo sapiens
  Light chain CDR3
LQHNSYPYT

SEQ ID NO: 10140 - protein, 9 aa, Homo sapiens
  Light chain CDR3
LQHNSYPYT

SEQ ID NO: 10141 - protein, 9 aa, Homo sapiens
  Light chain CDR3
QQLDSYPFT

SEQ ID NO: 10142 - protein, 9 aa, Homo sapiens
  Light chain CDR3
QQGNKHPWT

SEQ ID NO: 10143 - protein, 9 aa, Homo sapiens
  Light chain CDR3
HQSSTLPWT

SEQ ID NO: 10144 - protein, 9 aa, Homo sapiens
  Light chain CDR3
QQYKSYPLT

SEQ ID NO: 10145 - protein, 9 aa, Homo sapiens
  Light chain CDR3
QQDYNLPLT

SEQ ID NO: 10146 - protein, 9 aa, Homo sapiens
  Light chain CDR3
QQYNSYPRT

SEQ ID NO: 10147 - protein, 9 aa, Homo sapiens
  Light chain CDR3
QQLNSYPYT

SEQ ID NO: 10148 - protein, 9 aa, Homo sapiens
  Light chain CDR3
QQLNSYPRT

SEQ ID NO: 10149 - protein, 9 aa, Homo sapiens
  Light chain CDR3
QQLNSYPYT

SEQ ID NO: 10150 - protein, 9 aa, Homo sapiens
  Light chain CDR3
LQDYNYPHT

SEQ ID NO: 10151 - protein, 9 aa, Homo sapiens
  Light chain CDR3
LQDYNFPRT

SEQ ID NO: 10152 - protein, 9 aa, Homo sapiens
  Light chain CDR3
QQYGRSPFT

SEQ ID NO: 10153 - protein, 9 aa, Homo sapiens
  Light chain CDR3
QQYGSSPYT

SEQ ID NO: 10154 - protein, 9 aa, Homo sapiens
  Light chain CDR3
QQLNSYPYT

SEQ ID NO: 10155 - protein, 9 aa, Homo sapiens
  Light chain CDR3
QRYGSSPYT

SEQ ID NO: 10156 - protein, 9 aa, Homo sapiens
  Light chain CDR3
LQHNSYPYT

SEQ ID NO: 10157 - protein, 9 aa, Homo sapiens
  Light chain CDR3
QQYTSYPYT

SEQ ID NO: 10158 - protein, 9 aa, Homo sapiens
  Light chain CDR3
HQSSSLPYT

SEQ ID NO: 10159 - protein, 9 aa, Homo sapiens
  Light chain CDR3
LQDYNYPRT

SEQ ID NO: 10160 - protein, 9 aa, Homo sapiens
  Light chain CDR3
LQHNSYPWT

SEQ ID NO: 10161 - protein, 9 aa, Homo sapiens
  Light chain CDR3
LQDYNYPPT

SEQ ID NO: 10162 - protein, 9 aa, Homo sapiens
  Light chain CDR3
LQHNSYPYT

SEQ ID NO: 10163 - protein, 9 aa, Homo sapiens
  Light chain CDR3
LQHNSYPYT

SEQ ID NO: 10164 - protein, 9 aa, Homo sapiens
  Light chain CDR3
LQHNSYPYT

SEQ ID NO: 10165 - protein, 9 aa, Homo sapiens
  Light chain CDR3
LQHNSYPYT

SEQ ID NO: 10166 - protein, 9 aa, Homo sapiens
  Light chain CDR3
LQHNSYPYT

SEQ ID NO: 10167 - protein, 9 aa, Homo sapiens
  Light chain CDR3
LQHNSYPYT

SEQ ID NO: 10168 - protein, 9 aa, Homo sapiens
  Light chain CDR3
LQDYNYPRT

SEQ ID NO: 10169 - protein, 9 aa, Homo sapiens
  Light chain CDR3
LQHNSYPYT

SEQ ID NO: 10170 - protein, 9 aa, Homo sapiens
  Light chain CDR3
LQDYNYPWT

SEQ ID NO: 10171 - protein, 9 aa, Homo sapiens
  Light chain CDR3
QQYNSYPYT

SEQ ID NO: 10172 - protein, 9 aa, Homo sapiens
  Light chain CDR3
LQHNSYPRT

SEQ ID NO: 10173 - protein, 9 aa, Homo sapiens
  Light chain CDR3
QKYNSAPFT

SEQ ID NO: 10174 - protein, 9 aa, Homo sapiens
  Light chain CDR3
QQYNSYPYT

SEQ ID NO: 10175 - protein, 9 aa, Homo sapiens
  Light chain CDR3
QQYNYWPLT

SEQ ID NO: 10176 - protein, 9 aa, Homo sapiens
  Light chain CDR3
QQYGSSPRT

SEQ ID NO: 10177 - protein, 9 aa, Homo sapiens
  Light chain CDR3
QQLNSYPYT

SEQ ID NO: 10178 - protein, 9 aa, Homo sapiens
  Light chain CDR3
LQHNSYPYT

SEQ ID NO: 10179 - protein, 9 aa, Homo sapiens
  Light chain CDR3
QQLNSYPFT

SEQ ID NO: 10180 - protein, 9 aa, Homo sapiens
  Light chain CDR3
QQYNSYPYT

SEQ ID NO: 10181 - protein, 9 aa, Homo sapiens
  Light chain CDR3
QQLNSYPRT

SEQ ID NO: 10182 - protein, 9 aa, Homo sapiens
  Light chain CDR3
QQFNNYPST

SEQ ID NO: 10183 - protein, 9 aa, Homo sapiens
  Light chain CDR3
QQYNSYPYT

SEQ ID NO: 10184 - protein, 9 aa, Homo sapiens
  Light chain CDR3
QQYNSYPYT

SEQ ID NO: 10185 - protein, 9 aa, Homo sapiens
  Light chain CDR3
QQYNSYPYT

SEQ ID NO: 10186 - protein, 9 aa, Homo sapiens
  Light chain CDR3
HQSSSLPYT

SEQ ID NO: 10187 - protein, 9 aa, Homo sapiens
  Light chain CDR3
QQYNSYPYT

SEQ ID NO: 10188 - protein, 9 aa, Homo sapiens
  Light chain CDR3
QKYNSGPFT

SEQ ID NO: 10189 - protein, 9 aa, Homo sapiens
  Light chain CDR3
QQYNSYPYT

SEQ ID NO: 10190 - protein, 9 aa, Homo sapiens
  Light chain CDR3
QQYNSYPYT

SEQ ID NO: 10191 - protein, 9 aa, Homo sapiens
  Light chain CDR3
QQYNSYPYT

SEQ ID NO: 10192 - protein, 9 aa, Homo sapiens
  Light chain CDR3
QQYNSYPYT

SEQ ID NO: 10193 - protein, 9 aa, Homo sapiens
  Light chain CDR3
QQFNNYALT

SEQ ID NO: 10194 - protein, 9 aa, Homo sapiens
  Light chain CDR3
QQYNNWPLT

SEQ ID NO: 10195 - protein, 9 aa, Homo sapiens
  Light chain CDR3
LQHNSYPRT

SEQ ID NO: 10196 - protein, 9 aa, Homo sapiens
  Light chain CDR3
QKYNSAPYT

SEQ ID NO: 10197 - protein, 9 aa, Homo sapiens
  Light chain CDR3
LQHNSYPWT

SEQ ID NO: 10198 - protein, 9 aa, Homo sapiens
  Light chain CDR3
QKYNGAPYT

SEQ ID NO: 10199 - protein, 9 aa, Homo sapiens
  Light chain CDR3
QQRSNWPYT

SEQ ID NO: 10200 - protein, 9 aa, Homo sapiens
  Light chain CDR3
QKYNSDPYT

SEQ ID NO: 10201 - protein, 9 aa, Homo sapiens
  Light chain CDR3
QQLNSYPRT

SEQ ID NO: 10202 - protein, 9 aa, Homo sapiens
  Light chain CDR3
QKYNSAPYA

SEQ ID NO: 10203 - protein, 9 aa, Homo sapiens
  Light chain CDR3
LQHNSYPLT

SEQ ID NO: 10204 - protein, 9 aa, Homo sapiens
  Light chain CDR3
QQDYNLSFT

SEQ ID NO: 10205 - protein, 9 aa, Homo sapiens
  Light chain CDR3
QKYNSAPYT

SEQ ID NO: 10206 - protein, 9 aa, Homo sapiens
  Light chain CDR3
QHRSNWLRT

SEQ ID NO: 10207 - protein, 9 aa, Homo sapiens
  Light chain CDR3
QKCNSAPYT

SEQ ID NO: 10208 - protein, 9 aa, Homo sapiens
  Light chain CDR3
QQYNTWPRT

SEQ ID NO: 10209 - protein, 9 aa, Homo sapiens
  Light chain CDR3
QQYNSYSYT

SEQ ID NO: 10210 - protein, 9 aa, Homo sapiens
  Light chain CDR3
QQYNSYSYT

SEQ ID NO: 10211 - protein, 9 aa, Homo sapiens
  Light chain CDR3
QQRNNWPYT

SEQ ID NO: 10212 - protein, 9 aa, Homo sapiens
  Light chain CDR3
QQRNNWPYT

SEQ ID NO: 10213 - protein, 9 aa, Homo sapiens
  Light chain CDR3
LQDYNYPYT

SEQ ID NO: 10214 - protein, 9 aa, Homo sapiens
  Light chain CDR3
QNHNSAPYT

SEQ ID NO: 10215 - protein, 9 aa, Homo sapiens
  Light chain CDR3
QKYNSAPYT

SEQ ID NO: 10216 - protein, 9 aa, Homo sapiens
  Light chain CDR3
QQYNNYSYT

SEQ ID NO: 10217 - protein, 9 aa, Homo sapiens
  Light chain CDR3
QQYNTWPRT

SEQ ID NO: 10218 - protein, 9 aa, Homo sapiens
  Light chain CDR3
QQRNNWPYT

SEQ ID NO: 10219 - protein, 8 aa, Homo sapiens
  Light chain CDR3
QQDYNLYT

SEQ ID NO: 10220 - protein, 9 aa, Homo sapiens
  Light chain CDR3
QQYNTWPRT

SEQ ID NO: 10221 - protein, 9 aa, Homo sapiens
  Light chain CDR3
QQYNTWPRT

SEQ ID NO: 10222 - protein, 9 aa, Homo sapiens
  Light chain CDR3
QQYNTWPRT

SEQ ID NO: 10223 - protein, 9 aa, Homo sapiens
  Light chain CDR3
QQYNTWPRT

SEQ ID NO: 10224 - protein, 9 aa, Homo sapiens
  Light chain CDR3
QQYNTWPRT

SEQ ID NO: 10225 - protein, 9 aa, Homo sapiens
  Light chain CDR3
QQYNSYSYT

SEQ ID NO: 10226 - protein, 9 aa, Homo sapiens
  Light chain CDR3
QQYNTWPRT

SEQ ID NO: 10227 - protein, 9 aa, Homo sapiens
  Light chain CDR3
QQYNTWPRT

SEQ ID NO: 10228 - protein, 9 aa, Homo sapiens
  Light chain CDR3
LQDYNYPWT

SEQ ID NO: 10229 - protein, 9 aa, Homo sapiens
  Light chain CDR3
LQDYNYPYT

SEQ ID NO: 10230 - protein, 9 aa, Homo sapiens
  Light chain CDR3
LQDYNYPRT

SEQ ID NO: 10231 - protein, 9 aa, Homo sapiens
  Light chain CDR3
LQDYTYPRT

SEQ ID NO: 10232 - protein, 9 aa, Homo sapiens
  Light chain CDR3
LQHNSYPRT

SEQ ID NO: 10233 - protein, 9 aa, Homo sapiens
  Light chain CDR3
LQDYNYPWT

SEQ ID NO: 10234 - protein, 9 aa, Homo sapiens
  Light chain CDR3
LQDYNYPYT

SEQ ID NO: 10235 - protein, 9 aa, Homo sapiens
  Light chain CDR3
LQHNSYPRT

SEQ ID NO: 10236 - protein, 9 aa, Homo sapiens
  Light chain CDR3
PQDYNYPRT

SEQ ID NO: 10237 - protein, 9 aa, Homo sapiens
  Light chain CDR3
LQDYNYPWT

SEQ ID NO: 10238 - protein, 9 aa, Homo sapiens
  Light chain CDR3
LQDYNYPWT

SEQ ID NO: 10239 - protein, 9 aa, Homo sapiens
  Light chain CDR3
LQDYNYPWT

SEQ ID NO: 10240 - protein, 9 aa, Homo sapiens
  Light chain CDR3
QQLNSYPRT

SEQ ID NO: 10241 - protein, 9 aa, Homo sapiens
  Light chain CDR3
LQDYNYPWT

SEQ ID NO: 10242 - protein, 9 aa, Homo sapiens
  Light chain CDR3
LQDYNYPWT

SEQ ID NO: 10243 - protein, 9 aa, Homo sapiens
  Light chain CDR3
LQHNSYPRT

SEQ ID NO: 10244 - protein, 9 aa, Homo sapiens
  Light chain CDR3
LQDYNYPYT

SEQ ID NO: 10245 - protein, 9 aa, Homo sapiens
  Light chain CDR3
LQDYNYPYT

SEQ ID NO: 10246 - protein, 9 aa, Homo sapiens
  Light chain CDR3
LQDYNYPYT

SEQ ID NO: 10247 - protein, 9 aa, Homo sapiens
  Light chain CDR3
LQDYNYPWT

SEQ ID NO: 10248 - protein, 9 aa, Homo sapiens
  Light chain CDR3
LQDYNYPYT

SEQ ID NO: 10249 - protein, 9 aa, Homo sapiens
  Light chain CDR3
LQDYNYPYT

SEQ ID NO: 10250 - protein, 9 aa, Homo sapiens
  Light chain CDR3
LQDYNYPWT

SEQ ID NO: 10251 - protein, 9 aa, Homo sapiens
  Light chain CDR3
LQDYNYPWT

SEQ ID NO: 10252 - protein, 9 aa, Homo sapiens
  Light chain CDR3
LQHNSYPLT

SEQ ID NO: 10253 - protein, 9 aa, Homo sapiens
  Light chain CDR3
LQDYNYPRT

SEQ ID NO: 10254 - protein, 9 aa, Homo sapiens
  Light chain CDR3
LQDYNYPRT

SEQ ID NO: 10255 - protein, 9 aa, Homo sapiens
  Light chain CDR3
LQDYNYPWT

SEQ ID NO: 10256 - protein, 9 aa, Homo sapiens
  Light chain CDR3
LQDYNYPRT

SEQ ID NO: 10257 - protein, 9 aa, Homo sapiens
  Light chain CDR3
LQYISYPWT

SEQ ID NO: 10258 - protein, 9 aa, Homo sapiens
  Light chain CDR3
QQYYSDPPT

SEQ ID NO: 10259 - protein, 9 aa, Homo sapiens
  Light chain CDR3
LQYKSYLYT

SEQ ID NO: 10260 - protein, 9 aa, Homo sapiens
  Light chain CDR3
HQLNSFPLT

SEQ ID NO: 10261 - protein, 9 aa, Homo sapiens
  Light chain CDR3
LQHNSYPWT

SEQ ID NO: 10262 - protein, 9 aa, Homo sapiens
  Light chain CDR3
LQDYIYPYT

SEQ ID NO: 10263 - protein, 9 aa, Homo sapiens
  Light chain CDR3
LQYNSFPFT

SEQ ID NO: 10264 - protein, 9 aa, Homo sapiens
  Light chain CDR3
LQYNSYPLT

SEQ ID NO: 10265 - protein, 9 aa, Homo sapiens
  Light chain CDR3
LQYNSYPFT

SEQ ID NO: 10266 - protein, 9 aa, Homo sapiens
  Light chain CDR3
LQHNSFPFT

SEQ ID NO: 10267 - protein, 9 aa, Homo sapiens
  Light chain CDR3
QQYYSDPPT

SEQ ID NO: 10268 - protein, 9 aa, Homo sapiens
  Light chain CDR3
LQYNNYPFT

SEQ ID NO: 10269 - protein, 9 aa, Homo sapiens
  Light chain CDR3
QQYYSDPPT

SEQ ID NO: 10270 - protein, 9 aa, Homo sapiens
  Light chain CDR3
LQHNSYPLT

SEQ ID NO: 10271 - protein, 9 aa, Homo sapiens
  Light chain CDR3
LQHNSYPFT

SEQ ID NO: 10272 - protein, 9 aa, Homo sapiens
  Light chain CDR3
LQDYIYPYT

SEQ ID NO: 10273 - protein, 9 aa, Homo sapiens
  Light chain CDR3
QQYHNWPLT

SEQ ID NO: 10274 - protein, 9 aa, Homo sapiens
  Light chain CDR3
LQHNSYPWT

SEQ ID NO: 10275 - protein, 9 aa, Homo sapiens
  Light chain CDR3
LQHNSYPFT

SEQ ID NO: 10276 - protein, 9 aa, Homo sapiens
  Light chain CDR3
QKYNSAPFT

SEQ ID NO: 10277 - protein, 9 aa, Homo sapiens
  Light chain CDR3
LQHNSYPFT

SEQ ID NO: 10278 - protein, 9 aa, Homo sapiens
  Light chain CDR3
LQYTNYPWT

SEQ ID NO: 10279 - protein, 9 aa, Homo sapiens
  Light chain CDR3
LQDYNYPIT

SEQ ID NO: 10280 - protein, 9 aa, Homo sapiens
  Light chain CDR3
QQYYSDPPT

SEQ ID NO: 10281 - protein, 9 aa, Homo sapiens
  Light chain CDR3
LQYNSYPFT

SEQ ID NO: 10282 - protein, 9 aa, Homo sapiens
  Light chain CDR3
LQYKSYPYT

SEQ ID NO: 10283 - protein, 9 aa, Homo sapiens
  Light chain CDR3
QQYYSDPPT

SEQ ID NO: 10284 - protein, 9 aa, Homo sapiens
  Light chain CDR3
LQHNSYPFT

SEQ ID NO: 10285 - protein, 9 aa, Homo sapiens
  Light chain CDR3
LQYISYPFT

SEQ ID NO: 10286 - protein, 9 aa, Homo sapiens
  Light chain CDR3
QQLNSYPRT

SEQ ID NO: 10287 - protein, 9 aa, Homo sapiens
  Light chain CDR3
LQHNSYPPT

SEQ ID NO: 10288 - protein, 9 aa, Homo sapiens
  Light chain CDR3
LQYISYPWT

SEQ ID NO: 10289 - protein, 9 aa, Homo sapiens
  Light chain CDR3
LQYKSYLYT

SEQ ID NO: 10290 - protein, 9 aa, Homo sapiens
  Light chain CDR3
LQHNSYPWT

SEQ ID NO: 10291 - protein, 9 aa, Homo sapiens
  Light chain CDR3
QQYYSDPPT

SEQ ID NO: 10292 - protein, 9 aa, Homo sapiens
  Light chain CDR3
HQLNSYPLT

SEQ ID NO: 10293 - protein, 9 aa, Homo sapiens
  Light chain CDR3
LQHNSYPWT

SEQ ID NO: 10294 - protein, 9 aa, Homo sapiens
  Light chain CDR3
LQYKSYLYT

SEQ ID NO: 10295 - protein, 9 aa, Homo sapiens
  Light chain CDR3
LQHTSYPWT

SEQ ID NO: 10296 - protein, 9 aa, Homo sapiens
  Light chain CDR3
LQHNSYPLT

SEQ ID NO: 10297 - protein, 9 aa, Homo sapiens
  Light chain CDR3
LQYISYPWT

SEQ ID NO: 10298 - protein, 9 aa, Homo sapiens
  Light chain CDR3
QQYYSDPPT

SEQ ID NO: 10299 - protein, 9 aa, Homo sapiens
  Light chain CDR3
QQLNFYPPT

SEQ ID NO: 10300 - protein, 9 aa, Homo sapiens
  Light chain CDR3
LQYKSYLYT

SEQ ID NO: 10301 - protein, 9 aa, Homo sapiens
  Light chain CDR3
HQLNSFPLT

SEQ ID NO: 10302 - protein, 9 aa, Homo sapiens
  Light chain CDR3
QQYYSDPPT

SEQ ID NO: 10303 - protein, 9 aa, Homo sapiens
  Light chain CDR3
LQDHNYPWT

SEQ ID NO: 10304 - protein, 9 aa, Homo sapiens
  Light chain CDR3
LQHNSYPFT

SEQ ID NO: 10305 - protein, 9 aa, Homo sapiens
  Light chain CDR3
LQHNSYPLT

SEQ ID NO: 10306 - protein, 9 aa, Homo sapiens
  Light chain CDR3
HQLNSYPLT

SEQ ID NO: 10307 - protein, 9 aa, Homo sapiens
  Light chain CDR3
LQYISYPWT

SEQ ID NO: 10308 - protein, 9 aa, Homo sapiens
  Light chain CDR3
LQHNSYPFT

SEQ ID NO: 10309 - protein, 9 aa, Homo sapiens
  Light chain CDR3
QQYNSYSYT

SEQ ID NO: 10310 - protein, 9 aa, Homo sapiens
  Light chain CDR3
QKYNSAPFT

SEQ ID NO: 10311 - protein, 9 aa, Homo sapiens
  Light chain CDR3
LQDFIYPWT

SEQ ID NO: 10312 - protein, 9 aa, Homo sapiens
  Light chain CDR3
LQHNSFPFT

SEQ ID NO: 10313 - protein, 9 aa, Homo sapiens
  Light chain CDR3
LQYNTYPFT

SEQ ID NO: 10314 - protein, 9 aa, Homo sapiens
  Light chain CDR3
LQYNSFPFT

SEQ ID NO: 10315 - protein, 9 aa, Homo sapiens
  Light chain CDR3
LQHNSYPWT

SEQ ID NO: 10316 - protein, 9 aa, Homo sapiens
  Light chain CDR3
LQYINYPWT

SEQ ID NO: 10317 - protein, 9 aa, Homo sapiens
  Light chain CDR3
QQHNNWPFT

SEQ ID NO: 10318 - protein, 9 aa, Homo sapiens
  Light chain CDR3
QKYNSAPFT

SEQ ID NO: 10319 - protein, 9 aa, Homo sapiens
  Light chain CDR3
LQDYNYPYT

SEQ ID NO: 10320 - protein, 9 aa, Homo sapiens
  Light chain CDR3
LQYNSYPWT

SEQ ID NO: 10321 - protein, 9 aa, Homo sapiens
  Light chain CDR3
QKYNSAPFT

SEQ ID NO: 10322 - protein, 9 aa, Homo sapiens
  Light chain CDR3
LQHNSFPFT

SEQ ID NO: 10323 - protein, 9 aa, Homo sapiens
  Light chain CDR3
LQHNSYPFT

SEQ ID NO: 10324 - protein, 9 aa, Homo sapiens
  Light chain CDR3
LQHNSLPFT

SEQ ID NO: 10325 - protein, 9 aa, Homo sapiens
  Light chain CDR3
QQSYSTPWT

SEQ ID NO: 10326 - protein, 9 aa, Homo sapiens
  Light chain CDR3
LQHNSYPFT

SEQ ID NO: 10327 - protein, 9 aa, Homo sapiens
  Light chain CDR3
LQHNSYLLT

SEQ ID NO: 10328 - protein, 9 aa, Homo sapiens
  Light chain CDR3
QQYNSYSYT

SEQ ID NO: 10329 - protein, 9 aa, Homo sapiens
  Light chain CDR3
QQYGSSPYT

SEQ ID NO: 10330 - protein, 9 aa, Homo sapiens
  Light chain CDR3
LQHNSFPFT

SEQ ID NO: 10331 - protein, 9 aa, Homo sapiens
  Light chain CDR3
LQDFIYPWT

SEQ ID NO: 10332 - protein, 9 aa, Homo sapiens
  Light chain CDR3
LQHNSYPFT

SEQ ID NO: 10333 - protein, 9 aa, Homo sapiens
  Light chain CDR3
QQYGSSPFT

SEQ ID NO: 10334 - protein, 9 aa, Homo sapiens
  Light chain CDR3
QQDYNLPFT

SEQ ID NO: 10335 - protein, 9 aa, Homo sapiens
  Light chain CDR3
QQYGSSPWT

SEQ ID NO: 10336 - protein, 9 aa, Homo sapiens
  Light chain CDR3
QQYNNWPLT

SEQ ID NO: 10337 - protein, 9 aa, Homo sapiens
  Light chain CDR3
LQDYNYPWT

SEQ ID NO: 10338 - protein, 9 aa, Homo sapiens
  Light chain CDR3
QKYNSAPFT

SEQ ID NO: 10339 - protein, 9 aa, Homo sapiens
  Light chain CDR3
LQYNTYPFT

SEQ ID NO: 10340 - protein, 9 aa, Homo sapiens
  Light chain CDR3
LQHTSYPWT

SEQ ID NO: 10341 - protein, 9 aa, Homo sapiens
  Light chain CDR3
LQDFIYPWT

SEQ ID NO: 10342 - protein, 9 aa, Homo sapiens
  Light chain CDR3
QQYNSYSYT

SEQ ID NO: 10343 - protein, 8 aa, Homo sapiens
  Light chain CDR3
QQDYNLPT

SEQ ID NO: 10344 - protein, 9 aa, Homo sapiens
  Light chain CDR3
LQDFIYPWT

SEQ ID NO: 10345 - protein, 9 aa, Homo sapiens
  Light chain CDR3
LQYNSFPFT

SEQ ID NO: 10346 - protein, 9 aa, Homo sapiens
  Light chain CDR3
QQYNSYSYT

SEQ ID NO: 10347 - protein, 9 aa, Homo sapiens
  Light chain CDR3
LQHNSYPYT

SEQ ID NO: 10348 - protein, 9 aa, Homo sapiens
  Light chain CDR3
QQYNNWPYT

SEQ ID NO: 10349 - protein, 9 aa, Homo sapiens
  Light chain CDR3
QKYNSAPYT

SEQ ID NO: 10350 - protein, 9 aa, Homo sapiens
  Light chain CDR3
LQHNSYPLT

SEQ ID NO: 10351 - protein, 9 aa, Homo sapiens
  Light chain CDR3
QQFNSYPYT

SEQ ID NO: 10352 - protein, 9 aa, Homo sapiens
  Light chain CDR3
QQYNNWPFT

SEQ ID NO: 10353 - protein, 9 aa, Homo sapiens
  Light chain CDR3
LQHNSYPLT

SEQ ID NO: 10354 - protein, 9 aa, Homo sapiens
  Light chain CDR3
LQHNSYPLT

SEQ ID NO: 10355 - protein, 9 aa, Homo sapiens
  Light chain CDR3
QQYNNWPYT

SEQ ID NO: 10356 - protein, 9 aa, Homo sapiens
  Light chain CDR3
HQSSSLPQT

SEQ ID NO: 10357 - protein, 9 aa, Homo sapiens
  Light chain CDR3
HQSSSLPQT

SEQ ID NO: 10358 - protein, 9 aa, Homo sapiens
  Light chain CDR3
QQYNNWPYT

SEQ ID NO: 10359 - protein, 9 aa, Homo sapiens
  Light chain CDR3
QQYNNWPYT

SEQ ID NO: 10360 - protein, 9 aa, Homo sapiens
  Light chain CDR3
QQYNNWPYT

SEQ ID NO: 10361 - protein, 9 aa, Homo sapiens
  Light chain CDR3
QQYNNWPYT

SEQ ID NO: 10362 - protein, 9 aa, Homo sapiens
  Light chain CDR3
QQFNNYPYT

SEQ ID NO: 10363 - protein, 9 aa, Homo sapiens
  Light chain CDR3
QQYNNWPFT

SEQ ID NO: 10364 - protein, 9 aa, Homo sapiens
  Light chain CDR3
QQYNNWPYT

SEQ ID NO: 10365 - protein, 9 aa, Homo sapiens
  Light chain CDR3
QQYNNWPYT

SEQ ID NO: 10366 - protein, 9 aa, Homo sapiens
  Light chain CDR3
QQYNNWPYT

SEQ ID NO: 10367 - protein, 9 aa, Homo sapiens
  Light chain CDR3
QQYNNWPYT

SEQ ID NO: 10368 - protein, 9 aa, Homo sapiens
  Light chain CDR3
QQYNNWPYT

SEQ ID NO: 10369 - protein, 9 aa, Homo sapiens
  Light chain CDR3
QQYNNWPYT

SEQ ID NO: 10370 - protein, 9 aa, Homo sapiens
  Light chain CDR3
QQYNNWPYT

SEQ ID NO: 10371 - protein, 9 aa, Homo sapiens
  Light chain CDR3
QQYNNWPYT

SEQ ID NO: 10372 - protein, 9 aa, Homo sapiens
  Light chain CDR3
QQYNNWPYT

SEQ ID NO: 10373 - protein, 10 aa, Homo sapiens
  Light chain CDR3
MQGTHWPPYT

SEQ ID NO: 10374 - protein, 9 aa, Homo sapiens
  Light chain CDR3
QQYNNWPYT

SEQ ID NO: 10375 - protein, 9 aa, Homo sapiens
  Light chain CDR3
LQHNSYPLT

SEQ ID NO: 10376 - protein, 9 aa, Homo sapiens
  Light chain CDR3
QQYNNWPYT

SEQ ID NO: 10377 - protein, 9 aa, Homo sapiens
  Light chain CDR3
QQYNNWPFT

SEQ ID NO: 10378 - protein, 9 aa, Homo sapiens
  Light chain CDR3
LQYNSYPLT

SEQ ID NO: 10379 - protein, 9 aa, Homo sapiens
  Light chain CDR3
QQYNNWPYT

SEQ ID NO: 10380 - protein, 8 aa, Homo sapiens
  Light chain CDR3
QQFNNYPT

SEQ ID NO: 10381 - protein, 9 aa, Homo sapiens
  Light chain CDR3
LQHNSYPFT

SEQ ID NO: 10382 - protein, 9 aa, Homo sapiens
  Light chain CDR3
QQFNNYPYT

SEQ ID NO: 10383 - protein, 9 aa, Homo sapiens
  Light chain CDR3
QQLNSYPRT

SEQ ID NO: 10384 - protein, 9 aa, Homo sapiens
  Light chain CDR3
QQYNNWPYT

SEQ ID NO: 10385 - protein, 9 aa, Homo sapiens
  Light chain CDR3
QQFNNYPYT

SEQ ID NO: 10386 - protein, 8 aa, Homo sapiens
  Light chain CDR3
QQFNNYPT

SEQ ID NO: 10387 - protein, 9 aa, Homo sapiens
  Light chain CDR3
QQLNSYPIT

SEQ ID NO: 10388 - protein, 9 aa, Homo sapiens
  Light chain CDR3
QQLNSYPIT

SEQ ID NO: 10389 - protein, 9 aa, Homo sapiens
  Light chain CDR3
LQHNTYPRT

SEQ ID NO: 10390 - protein, 9 aa, Homo sapiens
  Light chain CDR3
HQSSSLPHT

SEQ ID NO: 10391 - protein, 8 aa, Homo sapiens
  Light chain CDR3
QQYGSSLT

SEQ ID NO: 10392 - protein, 9 aa, Homo sapiens
  Light chain CDR3
LQHNSYPYT

SEQ ID NO: 10393 - protein, 9 aa, Homo sapiens
  Light chain CDR3
QQLNSYPIT

SEQ ID NO: 10394 - protein, 9 aa, Homo sapiens
  Light chain CDR3
QQLNSYPIT

SEQ ID NO: 10395 - protein, 9 aa, Homo sapiens
  Light chain CDR3
QQRSNWPFT

SEQ ID NO: 10396 - protein, 9 aa, Homo sapiens
  Light chain CDR3
LQHNSYPYT

SEQ ID NO: 10397 - protein, 9 aa, Homo sapiens
  Light chain CDR3
QQFNNYPCT

SEQ ID NO: 10398 - protein, 9 aa, Homo sapiens
  Light chain CDR3
QQLNSYPIT

SEQ ID NO: 10399 - protein, 7 aa, Homo sapiens
  Light chain CDR3
QQLNSYT

SEQ ID NO: 10400 - protein, 9 aa, Homo sapiens
  Light chain CDR3
HQSSSLPHT

SEQ ID NO: 10401 - protein, 9 aa, Homo sapiens
  Light chain CDR3
QQLNSYPIT

SEQ ID NO: 10402 - protein, 9 aa, Homo sapiens
  Light chain CDR3
QQYNNWPYT

SEQ ID NO: 10403 - protein, 9 aa, Homo sapiens
  Light chain CDR3
LQYNSYPLT

SEQ ID NO: 10404 - protein, 9 aa, Homo sapiens
  Light chain CDR3
QQLNSYPWT

SEQ ID NO: 10405 - protein, 9 aa, Homo sapiens
  Light chain CDR3
LQHNSYPLT

SEQ ID NO: 10406 - protein, 9 aa, Homo sapiens
  Light chain CDR3
LQHNSYPLT

SEQ ID NO: 10407 - protein, 9 aa, Homo sapiens
  Light chain CDR3
LQHNSFPWT

SEQ ID NO: 10408 - protein, 9 aa, Homo sapiens
  Light chain CDR3
LQYNSYPLT

SEQ ID NO: 10409 - protein, 9 aa, Homo sapiens
  Light chain CDR3
LQYNSYPLT

SEQ ID NO: 10410 - protein, 9 aa, Homo sapiens
  Light chain CDR3
LQHNSYPLT

SEQ ID NO: 10411 - protein, 9 aa, Homo sapiens
  Light chain CDR3
LQHNSYPLT

SEQ ID NO: 10412 - protein, 9 aa, Homo sapiens
  Light chain CDR3
LQYNSYPLT

SEQ ID NO: 10413 - protein, 9 aa, Homo sapiens
  Light chain CDR3
HQRNTWPYT

SEQ ID NO: 10414 - protein, 9 aa, Homo sapiens
  Light chain CDR3
HQSRTLPHT

SEQ ID NO: 10415 - protein, 9 aa, Homo sapiens
  Light chain CDR3
HQSSGLPHT

SEQ ID NO: 10416 - protein, 9 aa, Homo sapiens
  Light chain CDR3
HQSSILPLT

SEQ ID NO: 10417 - protein, 9 aa, Homo sapiens
  Light chain CDR3
HQSSRLPLT

SEQ ID NO: 10418 - protein, 9 aa, Homo sapiens
  Light chain CDR3
HQSSSLPCT

SEQ ID NO: 10419 - protein, 9 aa, Homo sapiens
  Light chain CDR3
HQSSSLPHT

SEQ ID NO: 10420 - protein, 9 aa, Homo sapiens
  Light chain CDR3
HQSSSLPHT

SEQ ID NO: 10421 - protein, 8 aa, Homo sapiens
  Light chain CDR3
HQSSSLPT

SEQ ID NO: 10422 - protein, 8 aa, Homo sapiens
  Light chain CDR3
HQSSSLPT

SEQ ID NO: 10423 - protein, 9 aa, Homo sapiens
  Light chain CDR3
HQSSSLPWT

SEQ ID NO: 10424 - protein, 9 aa, Homo sapiens
  Light chain CDR3
HQSSSLPWT

SEQ ID NO: 10425 - protein, 9 aa, Homo sapiens
  Light chain CDR3
HQSSSLPYT

SEQ ID NO: 10426 - protein, 9 aa, Homo sapiens
  Light chain CDR3
HQSSSLPYT

SEQ ID NO: 10427 - protein, 9 aa, Homo sapiens
  Light chain CDR3
HQSSSLPYT

SEQ ID NO: 10428 - protein, 9 aa, Homo sapiens
  Light chain CDR3
HQSSSLPYT

SEQ ID NO: 10429 - protein, 9 aa, Homo sapiens
  Light chain CDR3
HQSSSLPYT

SEQ ID NO: 10430 - protein, 9 aa, Homo sapiens
  Light chain CDR3
HQYNSYPYT

SEQ ID NO: 10431 - protein, 9 aa, Homo sapiens
  Light chain CDR3
IQHNSYPLT

SEQ ID NO: 10432 - protein, 9 aa, Homo sapiens
  Light chain CDR3
KQYNSYPYT

SEQ ID NO: 10433 - protein, 9 aa, Homo sapiens
  Light chain CDR3
LHHNSYPLT

SEQ ID NO: 10434 - protein, 9 aa, Homo sapiens
  Light chain CDR3
LHHNSYPLT

SEQ ID NO: 10435 - protein, 9 aa, Homo sapiens
  Light chain CDR3
LHHYIYPWT

SEQ ID NO: 10436 - protein, 9 aa, Homo sapiens
  Light chain CDR3
LHYNSYPLT

SEQ ID NO: 10437 - protein, 9 aa, Homo sapiens
  Light chain CDR3
LLYNSYPLT

SEQ ID NO: 10438 - protein, 9 aa, Homo sapiens
  Light chain CDR3
LPHYIYPWT

SEQ ID NO: 10439 - protein, 9 aa, Homo sapiens
  Light chain CDR3
LQDNNYPRT

SEQ ID NO: 10440 - protein, 9 aa, Homo sapiens
  Light chain CDR3
LQDYNYPFT

SEQ ID NO: 10441 - protein, 9 aa, Homo sapiens
  Light chain CDR3
LQDYNYPRT

SEQ ID NO: 10442 - protein, 9 aa, Homo sapiens
  Light chain CDR3
LQDYNYPWT

SEQ ID NO: 10443 - protein, 9 aa, Homo sapiens
  Light chain CDR3
LQDYNYPWT

SEQ ID NO: 10444 - protein, 9 aa, Homo sapiens
  Light chain CDR3
LQDYNYPWT

SEQ ID NO: 10445 - protein, 9 aa, Homo sapiens
  Light chain CDR3
LQDYNYPYT

SEQ ID NO: 10446 - protein, 9 aa, Homo sapiens
  Light chain CDR3
LQFNSYPLT

SEQ ID NO: 10447 - protein, 9 aa, Homo sapiens
  Light chain CDR3
LQHNIYPLT

SEQ ID NO: 10448 - protein, 9 aa, Homo sapiens
  Light chain CDR3
LQHNRYPLT

SEQ ID NO: 10449 - protein, 9 aa, Homo sapiens
  Light chain CDR3
LQHNSFPWT

SEQ ID NO: 10450 - protein, 9 aa, Homo sapiens
  Light chain CDR3
LQHNSSPLT

SEQ ID NO: 10451 - protein, 9 aa, Homo sapiens
  Light chain CDR3
LQHNSYHLT

SEQ ID NO: 10452 - protein, 9 aa, Homo sapiens
  Light chain CDR3
LQHNSYLLT

SEQ ID NO: 10453 - protein, 9 aa, Homo sapiens
  Light chain CDR3
LQHNSYLLT

SEQ ID NO: 10454 - protein, 9 aa, Homo sapiens
  Light chain CDR3
LQHNSYPFT

SEQ ID NO: 10455 - protein, 9 aa, Homo sapiens
  Light chain CDR3
LQHNSYPIT

SEQ ID NO: 10456 - protein, 9 aa, Homo sapiens
  Light chain CDR3
LQHNSYPLN

SEQ ID NO: 10457 - protein, 9 aa, Homo sapiens
  Light chain CDR3
LQHNSYPLP

SEQ ID NO: 10458 - protein, 9 aa, Homo sapiens
  Light chain CDR3
LQHNSYPLP

SEQ ID NO: 10459 - protein, 9 aa, Homo sapiens
  Light chain CDR3
LQHNSYPLS

SEQ ID NO: 10460 - protein, 9 aa, Homo sapiens
  Light chain CDR3
LQHNSYPLT

SEQ ID NO: 10461 - protein, 9 aa, Homo sapiens
  Light chain CDR3
LQHNSYPLT

SEQ ID NO: 10462 - protein, 9 aa, Homo sapiens
  Light chain CDR3
LQHNSYPLT

SEQ ID NO: 10463 - protein, 9 aa, Homo sapiens
  Light chain CDR3
LQHNSYPWT

SEQ ID NO: 10464 - protein, 9 aa, Homo sapiens
  Light chain CDR3
LQHNSYPWT

SEQ ID NO: 10465 - protein, 9 aa, Homo sapiens
  Light chain CDR3
LQHNSYPWT

SEQ ID NO: 10466 - protein, 9 aa, Homo sapiens
  Light chain CDR3
LQHNSYPWT

SEQ ID NO: 10467 - protein, 9 aa, Homo sapiens
  Light chain CDR3
LQHNSYPWT

SEQ ID NO: 10468 - protein, 9 aa, Homo sapiens
  Light chain CDR3
LQHNSYPWT

SEQ ID NO: 10469 - protein, 9 aa, Homo sapiens
  Light chain CDR3
LQHNSYPWT

SEQ ID NO: 10470 - protein, 9 aa, Homo sapiens
  Light chain CDR3
LQHNSYPWT

SEQ ID NO: 10471 - protein, 9 aa, Homo sapiens
  Light chain CDR3
LQHNSYPWT

SEQ ID NO: 10472 - protein, 9 aa, Homo sapiens
  Light chain CDR3
LQHNSYPWT

SEQ ID NO: 10473 - protein, 9 aa, Homo sapiens
  Light chain CDR3
LQHNSYPWT

SEQ ID NO: 10474 - protein, 9 aa, Homo sapiens
  Light chain CDR3
LQHNSYPWT

SEQ ID NO: 10475 - protein, 9 aa, Homo sapiens
  Light chain CDR3
LQHNSYPWT

SEQ ID NO: 10476 - protein, 9 aa, Homo sapiens
  Light chain CDR3
LQHNSYPYT

SEQ ID NO: 10477 - protein, 9 aa, Homo sapiens
  Light chain CDR3
LQHNSYTLT

SEQ ID NO: 10478 - protein, 9 aa, Homo sapiens
  Light chain CDR3
LQHNSYTLT

SEQ ID NO: 10479 - protein, 9 aa, Homo sapiens
  Light chain CDR3
LQHSSYPLT

SEQ ID NO: 10480 - protein, 9 aa, Homo sapiens
  Light chain CDR3
LQHYISPWT

SEQ ID NO: 10481 - protein, 9 aa, Homo sapiens
  Light chain CDR3
LQHYIYLWT

SEQ ID NO: 10482 - protein, 9 aa, Homo sapiens
  Light chain CDR3
LQHYIYPCT

SEQ ID NO: 10483 - protein, 9 aa, Homo sapiens
  Light chain CDR3
LQHYIYPGT

SEQ ID NO: 10484 - protein, 9 aa, Homo sapiens
  Light chain CDR3
LQHYIYPLT

SEQ ID NO: 10485 - protein, 9 aa, Homo sapiens
  Light chain CDR3
LQHYIYPWP

SEQ ID NO: 10486 - protein, 9 aa, Homo sapiens
  Light chain CDR3
LQHYIYPWS

SEQ ID NO: 10487 - protein, 9 aa, Homo sapiens
  Light chain CDR3
LQHYIYPWT

SEQ ID NO: 10488 - protein, 9 aa, Homo sapiens
  Light chain CDR3
LQHYIYPWT

SEQ ID NO: 10489 - protein, 9 aa, Homo sapiens
  Light chain CDR3
LQHYIYQWT

SEQ ID NO: 10490 - protein, 9 aa, Homo sapiens
  Light chain CDR3
LQNNSYPLT

SEQ ID NO: 10491 - protein, 9 aa, Homo sapiens
  Light chain CDR3
LQNNSYPLT

SEQ ID NO: 10492 - protein, 9 aa, Homo sapiens
  Light chain CDR3
LQNYIYPWT

SEQ ID NO: 10493 - protein, 9 aa, Homo sapiens
  Light chain CDR3
LQPNSYPLT

SEQ ID NO: 10494 - protein, 9 aa, Homo sapiens
  Light chain CDR3
LQYNCYPLT

SEQ ID NO: 10495 - protein, 9 aa, Homo sapiens
  Light chain CDR3
LQYNIYPLT

SEQ ID NO: 10496 - protein, 9 aa, Homo sapiens
  Light chain CDR3
LQYNRYPLT

SEQ ID NO: 10497 - protein, 9 aa, Homo sapiens
  Light chain CDR3
LQYNSSPLT

SEQ ID NO: 10498 - protein, 9 aa, Homo sapiens
  Light chain CDR3
LQYNSYHLT

SEQ ID NO: 10499 - protein, 9 aa, Homo sapiens
  Light chain CDR3
LQYNSYLLT

SEQ ID NO: 10500 - protein, 9 aa, Homo sapiens
  Light chain CDR3
LQYNSYPFT

SEQ ID NO: 10501 - protein, 9 aa, Homo sapiens
  Light chain CDR3
LQYNSYPIT

SEQ ID NO: 10502 - protein, 9 aa, Homo sapiens
  Light chain CDR3
LQYNSYPLA

SEQ ID NO: 10503 - protein, 9 aa, Homo sapiens
  Light chain CDR3
LQYNSYPLN

SEQ ID NO: 10504 - protein, 9 aa, Homo sapiens
  Light chain CDR3
LQYNSYPLP

SEQ ID NO: 10505 - protein, 9 aa, Homo sapiens
  Light chain CDR3
LQYNSYPLS

SEQ ID NO: 10506 - protein, 9 aa, Homo sapiens
  Light chain CDR3
LQYNSYPLT

SEQ ID NO: 10507 - protein, 9 aa, Homo sapiens
  Light chain CDR3
LQYNSYPLT

SEQ ID NO: 10508 - protein, 9 aa, Homo sapiens
  Light chain CDR3
LQYNSYPLT

SEQ ID NO: 10509 - protein, 9 aa, Homo sapiens
  Light chain CDR3
LQYNSYPLT

SEQ ID NO: 10510 - protein, 9 aa, Homo sapiens
  Light chain CDR3
LQYNSYPLT

SEQ ID NO: 10511 - protein, 9 aa, Homo sapiens
  Light chain CDR3
LQYNSYPLT

SEQ ID NO: 10512 - protein, 9 aa, Homo sapiens
  Light chain CDR3
LQYNSYPLT

SEQ ID NO: 10513 - protein, 9 aa, Homo sapiens
  Light chain CDR3
LQYNSYPLT

SEQ ID NO: 10514 - protein, 9 aa, Homo sapiens
  Light chain CDR3
LQYNSYPLT

SEQ ID NO: 10515 - protein, 9 aa, Homo sapiens
  Light chain CDR3
LQYNSYPLT

SEQ ID NO: 10516 - protein, 9 aa, Homo sapiens
  Light chain CDR3
LQYNSYPLT

SEQ ID NO: 10517 - protein, 9 aa, Homo sapiens
  Light chain CDR3
LQYNSYPLT

SEQ ID NO: 10518 - protein, 9 aa, Homo sapiens
  Light chain CDR3
LQYNSYPLT

SEQ ID NO: 10519 - protein, 9 aa, Homo sapiens
  Light chain CDR3
LQYNSYPLT

SEQ ID NO: 10520 - protein, 9 aa, Homo sapiens
  Light chain CDR3
LQYNSYPLT

SEQ ID NO: 10521 - protein, 9 aa, Homo sapiens
  Light chain CDR3
LQYNSYPLT

SEQ ID NO: 10522 - protein, 9 aa, Homo sapiens
  Light chain CDR3
LQYNSYPLT

SEQ ID NO: 10523 - protein, 9 aa, Homo sapiens
  Light chain CDR3
LQYNSYPPT

SEQ ID NO: 10524 - protein, 9 aa, Homo sapiens
  Light chain CDR3
LQYNSYPYT

SEQ ID NO: 10525 - protein, 9 aa, Homo sapiens
  Light chain CDR3
LQYNSYTLT

SEQ ID NO: 10526 - protein, 9 aa, Homo sapiens
  Light chain CDR3
LQYTSYPLT

SEQ ID NO: 10527 - protein, 9 aa, Homo sapiens
  Light chain CDR3
PQYNSYPYT

SEQ ID NO: 10528 - protein, 9 aa, Homo sapiens
  Light chain CDR3
QHRNTWPYT

SEQ ID NO: 10529 - protein, 9 aa, Homo sapiens
  Light chain CDR3
QHYNSYPYT

SEQ ID NO: 10530 - protein, 9 aa, Homo sapiens
  Light chain CDR3
QKYNSAPYT

SEQ ID NO: 10531 - protein, 9 aa, Homo sapiens
  Light chain CDR3
QLFNNYPWT

SEQ ID NO: 10532 - protein, 9 aa, Homo sapiens
  Light chain CDR3
QLYNSYPYT

SEQ ID NO: 10533 - protein, 9 aa, Homo sapiens
  Light chain CDR3
QQDNSYPYT

SEQ ID NO: 10534 - protein, 9 aa, Homo sapiens
  Light chain CDR3
QQDYNLPFT

SEQ ID NO: 10535 - protein, 8 aa, Homo sapiens
  Light chain CDR3
QQDYNLPT

SEQ ID NO: 10536 - protein, 8 aa, Homo sapiens
  Light chain CDR3
QQDYNLYT

SEQ ID NO: 10537 - protein, 9 aa, Homo sapiens
  Light chain CDR3
QQFDNYPWT

SEQ ID NO: 10538 - protein, 9 aa, Homo sapiens
  Light chain CDR3
QQFNNYLWT

SEQ ID NO: 10539 - protein, 9 aa, Homo sapiens
  Light chain CDR3
QQFNNYPCT

SEQ ID NO: 10540 - protein, 9 aa, Homo sapiens
  Light chain CDR3
QQFNNYPLT

SEQ ID NO: 10541 - protein, 10 aa, Homo sapiens
  Light chain CDR3
QQFNNYPMYT

SEQ ID NO: 10542 - protein, 9 aa, Homo sapiens
  Light chain CDR3
QQFNNYPWK

SEQ ID NO: 10543 - protein, 9 aa, Homo sapiens
  Light chain CDR3
QQFNNYPWP

SEQ ID NO: 10544 - protein, 9 aa, Homo sapiens
  Light chain CDR3
QQFNNYPWS

SEQ ID NO: 10545 - protein, 9 aa, Homo sapiens
  Light chain CDR3
QQFNNYPWT

SEQ ID NO: 10546 - protein, 9 aa, Homo sapiens
  Light chain CDR3
QQFNNYPWT

SEQ ID NO: 10547 - protein, 9 aa, Homo sapiens
  Light chain CDR3
QQFNNYPWT

SEQ ID NO: 10548 - protein, 9 aa, Homo sapiens
  Light chain CDR3
QQFNNYPWT

SEQ ID NO: 10549 - protein, 9 aa, Homo sapiens
  Light chain CDR3
QQFNNYPWT

SEQ ID NO: 10550 - protein, 9 aa, Homo sapiens
  Light chain CDR3
QQFNNYPWT

SEQ ID NO: 10551 - protein, 9 aa, Homo sapiens
  Light chain CDR3
QQFNNYPWT

SEQ ID NO: 10552 - protein, 9 aa, Homo sapiens
  Light chain CDR3
QQFNNYPWT

SEQ ID NO: 10553 - protein, 9 aa, Homo sapiens
  Light chain CDR3
QQFNNYQWT

SEQ ID NO: 10554 - protein, 9 aa, Homo sapiens
  Light chain CDR3
QQFNNYTWT

SEQ ID NO: 10555 - protein, 9 aa, Homo sapiens
  Light chain CDR3
QQFNSYPYT

SEQ ID NO: 10556 - protein, 9 aa, Homo sapiens
  Light chain CDR3
QQFNSYPYT

SEQ ID NO: 10557 - protein, 9 aa, Homo sapiens
  Light chain CDR3
QQHNSYIFT

SEQ ID NO: 10558 - protein, 9 aa, Homo sapiens
  Light chain CDR3
QQHNSYPYT

SEQ ID NO: 10559 - protein, 9 aa, Homo sapiens
  Light chain CDR3
QQLNSYPFT

SEQ ID NO: 10560 - protein, 9 aa, Homo sapiens
  Light chain CDR3
QQLNSYPFT

SEQ ID NO: 10561 - protein, 9 aa, Homo sapiens
  Light chain CDR3
QQLNSYPLT

SEQ ID NO: 10562 - protein, 9 aa, Homo sapiens
  Light chain CDR3
QQLNSYPRT

SEQ ID NO: 10563 - protein, 9 aa, Homo sapiens
  Light chain CDR3
QQNNSYPYT

SEQ ID NO: 10564 - protein, 9 aa, Homo sapiens
  Light chain CDR3
QQRKTWPYT

SEQ ID NO: 10565 - protein, 9 aa, Homo sapiens
  Light chain CDR3
QQRNNWPYT

SEQ ID NO: 10566 - protein, 9 aa, Homo sapiens
  Light chain CDR3
QQRNPWPYT

SEQ ID NO: 10567 - protein, 9 aa, Homo sapiens
  Light chain CDR3
QQRNTCPYT

SEQ ID NO: 10568 - protein, 9 aa, Homo sapiens
  Light chain CDR3
QQRNTLPYT

SEQ ID NO: 10569 - protein, 9 aa, Homo sapiens
  Light chain CDR3
QQRNTWPDT

SEQ ID NO: 10570 - protein, 9 aa, Homo sapiens
  Light chain CDR3
QQRNTWPHT

SEQ ID NO: 10571 - protein, 9 aa, Homo sapiens
  Light chain CDR3
QQRNTWPYP

SEQ ID NO: 10572 - protein, 9 aa, Homo sapiens
  Light chain CDR3
QQRNTWPYT

SEQ ID NO: 10573 - protein, 9 aa, Homo sapiens
  Light chain CDR3
QQRNTWPYT

SEQ ID NO: 10574 - protein, 9 aa, Homo sapiens
  Light chain CDR3
QQRNTWPYT

SEQ ID NO: 10575 - protein, 9 aa, Homo sapiens
  Light chain CDR3
QQRTTWPYT

SEQ ID NO: 10576 - protein, 9 aa, Homo sapiens
  Light chain CDR3
QQSNSYPYT

SEQ ID NO: 10577 - protein, 8 aa, Homo sapiens
  Light chain CDR3
QQYGSSIT

SEQ ID NO: 10578 - protein, 9 aa, Homo sapiens
  Light chain CDR3
QQYGSSMYT

SEQ ID NO: 10579 - protein, 9 aa, Homo sapiens
  Light chain CDR3
QQYNCYPYT

SEQ ID NO: 10580 - protein, 9 aa, Homo sapiens
  Light chain CDR3
QQYNHWPLT

SEQ ID NO: 10581 - protein, 9 aa, Homo sapiens
  Light chain CDR3
QQYNIYPYT

SEQ ID NO: 10582 - protein, 9 aa, Homo sapiens
  Light chain CDR3
QQYNNWPYP

SEQ ID NO: 10583 - protein, 9 aa, Homo sapiens
  Light chain CDR3
QQYNNWPYT

SEQ ID NO: 10584 - protein, 9 aa, Homo sapiens
  Light chain CDR3
QQYNNWPYT

SEQ ID NO: 10585 - protein, 9 aa, Homo sapiens
  Light chain CDR3
QQYNNWPYT

SEQ ID NO: 10586 - protein, 9 aa, Homo sapiens
  Light chain CDR3
QQYNNWPYT

SEQ ID NO: 10587 - protein, 9 aa, Homo sapiens
  Light chain CDR3
QQYNNYPYT

SEQ ID NO: 10588 - protein, 9 aa, Homo sapiens
  Light chain CDR3
QQYNRYPYT

SEQ ID NO: 10589 - protein, 9 aa, Homo sapiens
  Light chain CDR3
QQYNSSPYT

SEQ ID NO: 10590 - protein, 9 aa, Homo sapiens
  Light chain CDR3
QQYNSYLYT

SEQ ID NO: 10591 - protein, 9 aa, Homo sapiens
  Light chain CDR3
QQYNSYPDT

SEQ ID NO: 10592 - protein, 9 aa, Homo sapiens
  Light chain CDR3
QQYNSYPHT

SEQ ID NO: 10593 - protein, 9 aa, Homo sapiens
  Light chain CDR3
QQYNSYPLT

SEQ ID NO: 10594 - protein, 9 aa, Homo sapiens
  Light chain CDR3
QQYNSYPNT

SEQ ID NO: 10595 - protein, 9 aa, Homo sapiens
  Light chain CDR3
QQYNSYPPT

SEQ ID NO: 10596 - protein, 9 aa, Homo sapiens
  Light chain CDR3
QQYNSYPYN

SEQ ID NO: 10597 - protein, 9 aa, Homo sapiens
  Light chain CDR3
QQYNSYPYP

SEQ ID NO: 10598 - protein, 9 aa, Homo sapiens
  Light chain CDR3
QQYNSYPYS

SEQ ID NO: 10599 - protein, 9 aa, Homo sapiens
  Light chain CDR3
QQYNSYPYT

SEQ ID NO: 10600 - protein, 9 aa, Homo sapiens
  Light chain CDR3
QQYNSYPYT

SEQ ID NO: 10601 - protein, 9 aa, Homo sapiens
  Light chain CDR3
QQYNSYPYT

SEQ ID NO: 10602 - protein, 9 aa, Homo sapiens
  Light chain CDR3
QQYNSYPYT

SEQ ID NO: 10603 - protein, 9 aa, Homo sapiens
  Light chain CDR3
QQYNSYPYT

SEQ ID NO: 10604 - protein, 9 aa, Homo sapiens
  Light chain CDR3
QQYNSYPYT

SEQ ID NO: 10605 - protein, 9 aa, Homo sapiens
  Light chain CDR3
QQYNSYPYT

SEQ ID NO: 10606 - protein, 9 aa, Homo sapiens
  Light chain CDR3
QQYNSYPYT

SEQ ID NO: 10607 - protein, 9 aa, Homo sapiens
  Light chain CDR3
QQYNSYPYT

SEQ ID NO: 10608 - protein, 9 aa, Homo sapiens
  Light chain CDR3
QQYNSYPYT

SEQ ID NO: 10609 - protein, 9 aa, Homo sapiens
  Light chain CDR3
QQYNSYQYT

SEQ ID NO: 10610 - protein, 9 aa, Homo sapiens
  Light chain CDR3
QQYNSYRYT

SEQ ID NO: 10611 - protein, 9 aa, Homo sapiens
  Light chain CDR3
QQYNSYSYT

SEQ ID NO: 10612 - protein, 9 aa, Homo sapiens
  Light chain CDR3
QQYNSYTYT

SEQ ID NO: 10613 - protein, 9 aa, Homo sapiens
  Light chain CDR3
QQYTSYPYT

SEQ ID NO: 10614 - protein, 9 aa, Homo sapiens
  Light chain CDR3
YQSSSLPHT

SEQ ID NO: 10615 - protein, 8 aa, Homo sapiens
  Heavy chain CDR1
GDSIFSYY

SEQ ID NO: 10616 - protein, 8 aa, Homo sapiens
  Heavy chain CDR1
GDSIFSYY

SEQ ID NO: 10617 - protein, 8 aa, Homo sapiens
  Heavy chain CDR1
GDSIFSYY

SEQ ID NO: 10618 - protein, 8 aa, Homo sapiens
  Heavy chain CDR1
GDSIFSYY

SEQ ID NO: 10619 - protein, 8 aa, Homo sapiens
  Heavy chain CDR1
GDSIFSYY

SEQ ID NO: 10620 - protein, 8 aa, Homo sapiens
  Heavy chain CDR1
GDSIFSYY

SEQ ID NO: 10621 - protein, 8 aa, Homo sapiens
  Heavy chain CDR1
GDSIFSYY

SEQ ID NO: 10622 - protein, 8 aa, Homo sapiens
  Heavy chain CDR1
GDSIFSYY

SEQ ID NO: 10623 - protein, 8 aa, Homo sapiens
  Heavy chain CDR1
GDSIFSYY

SEQ ID NO: 10624 - protein, 8 aa, Homo sapiens
  Heavy chain CDR1
GDSIFSYY

SEQ ID NO: 10625 - protein, 8 aa, Homo sapiens
  Heavy chain CDR1
GDSIFSYY

SEQ ID NO: 10626 - protein, 8 aa, Homo sapiens
  Heavy chain CDR1
GDSIFSYY

SEQ ID NO: 10627 - protein, 8 aa, Homo sapiens
  Heavy chain CDR1
GDSIFSYY

SEQ ID NO: 10628 - protein, 8 aa, Homo sapiens
  Heavy chain CDR1
GYTFTSYY

SEQ ID NO: 10629 - protein, 8 aa, Homo sapiens
  Heavy chain CDR1
GDSIFSYY

SEQ ID NO: 10630 - protein, 8 aa, Homo sapiens
  Heavy chain CDR1
GDSIFSYY

SEQ ID NO: 10631 - protein, 8 aa, Homo sapiens
  Heavy chain CDR1
GDSIFSYY

SEQ ID NO: 10632 - protein, 8 aa, Homo sapiens
  Heavy chain CDR1
GDSIFSYY

SEQ ID NO: 10633 - protein, 8 aa, Homo sapiens
  Heavy chain CDR1
GDSIFSYY

SEQ ID NO: 10634 - protein, 8 aa, Homo sapiens
  Heavy chain CDR1
GDSIFSYY

SEQ ID NO: 10635 - protein, 8 aa, Homo sapiens
  Heavy chain CDR1
GDSIFSYY

SEQ ID NO: 10636 - protein, 8 aa, Homo sapiens
  Heavy chain CDR1
GDSIFSYY

SEQ ID NO: 10637 - protein, 8 aa, Homo sapiens
  Heavy chain CDR1
GDSIFSYY

SEQ ID NO: 10638 - protein, 8 aa, Homo sapiens
  Heavy chain CDR1
GDSIFSYY

SEQ ID NO: 10639 - protein, 8 aa, Homo sapiens
  Heavy chain CDR1
GDSIFSYY

SEQ ID NO: 10640 - protein, 8 aa, Homo sapiens
  Heavy chain CDR1
GDSIFSYY

SEQ ID NO: 10641 - protein, 8 aa, Homo sapiens
  Heavy chain CDR1
GDSIFSYY

SEQ ID NO: 10642 - protein, 8 aa, Homo sapiens
  Heavy chain CDR1
GDSIFSYY

SEQ ID NO: 10643 - protein, 8 aa, Homo sapiens
  Heavy chain CDR1
GYTFTSYY

SEQ ID NO: 10644 - protein, 8 aa, Homo sapiens
  Heavy chain CDR1
GYTFTSYY

SEQ ID NO: 10645 - protein, 8 aa, Homo sapiens
  Heavy chain CDR1
GDSIFSYY

SEQ ID NO: 10646 - protein, 8 aa, Homo sapiens
  Heavy chain CDR1
GDSIFSYY

SEQ ID NO: 10647 - protein, 8 aa, Homo sapiens
  Heavy chain CDR1
GDSIFSYY

SEQ ID NO: 10648 - protein, 8 aa, Homo sapiens
  Heavy chain CDR1
GDSIFSYY

SEQ ID NO: 10649 - protein, 8 aa, Homo sapiens
  Heavy chain CDR1
GDSIFSYY

SEQ ID NO: 10650 - protein, 8 aa, Homo sapiens
  Heavy chain CDR1
GDSIFSYY

SEQ ID NO: 10651 - protein, 8 aa, Homo sapiens
  Heavy chain CDR1
GDSIFSYY

SEQ ID NO: 10652 - protein, 8 aa, Homo sapiens
  Heavy chain CDR1
GDSIFSYY

SEQ ID NO: 10653 - protein, 8 aa, Homo sapiens
  Heavy chain CDR1
GYTFTSYY

SEQ ID NO: 10654 - protein, 8 aa, Homo sapiens
  Heavy chain CDR1
GDSIFSYY

SEQ ID NO: 10655 - protein, 8 aa, Homo sapiens
  Heavy chain CDR1
GDSIFSYY

SEQ ID NO: 10656 - protein, 8 aa, Homo sapiens
  Heavy chain CDR1
GDSIFSYY

SEQ ID NO: 10657 - protein, 8 aa, Homo sapiens
  Heavy chain CDR1
GDSIFSYY

SEQ ID NO: 10658 - protein, 8 aa, Homo sapiens
  Heavy chain CDR1
GDSIFSYY

SEQ ID NO: 10659 - protein, 8 aa, Homo sapiens
  Heavy chain CDR1
GDSIFSYY

SEQ ID NO: 10660 - protein, 8 aa, Homo sapiens
  Heavy chain CDR1
GDSIFSYY

SEQ ID NO: 10661 - protein, 8 aa, Homo sapiens
  Heavy chain CDR1
GDSIFSYY

SEQ ID NO: 10662 - protein, 8 aa, Homo sapiens
  Heavy chain CDR1
GDSIFSYY

SEQ ID NO: 10663 - protein, 8 aa, Homo sapiens
  Heavy chain CDR1
GDSIFSYY

SEQ ID NO: 10664 - protein, 8 aa, Homo sapiens
  Heavy chain CDR1
GDSIFSYY

SEQ ID NO: 10665 - protein, 8 aa, Homo sapiens
  Heavy chain CDR1
GDSIFSYY

SEQ ID NO: 10666 - protein, 8 aa, Homo sapiens
  Heavy chain CDR1
GDSIFSYY

SEQ ID NO: 10667 - protein, 8 aa, Homo sapiens
  Heavy chain CDR1
GDSIFSYY

SEQ ID NO: 10668 - protein, 8 aa, Homo sapiens
  Heavy chain CDR1
GDSIFSYY

SEQ ID NO: 10669 - protein, 8 aa, Homo sapiens
  Heavy chain CDR1
GDSIFSYY

SEQ ID NO: 10670 - protein, 8 aa, Homo sapiens
  Heavy chain CDR1
GYTLTELS

SEQ ID NO: 10671 - protein, 8 aa, Homo sapiens
  Heavy chain CDR1
GDSIFSYY

SEQ ID NO: 10672 - protein, 8 aa, Homo sapiens
  Heavy chain CDR1
GDSIFSYY

SEQ ID NO: 10673 - protein, 8 aa, Homo sapiens
  Heavy chain CDR1
GDSIFSYY

SEQ ID NO: 10674 - protein, 8 aa, Homo sapiens
  Heavy chain CDR1
GDSIFSYY

SEQ ID NO: 10675 - protein, 8 aa, Homo sapiens
  Heavy chain CDR1
GDSIFSYY

SEQ ID NO: 10676 - protein, 8 aa, Homo sapiens
  Heavy chain CDR1
GDSIFSYY

SEQ ID NO: 10677 - protein, 8 aa, Homo sapiens
  Heavy chain CDR1
GDSIFSYY

SEQ ID NO: 10678 - protein, 8 aa, Homo sapiens
  Heavy chain CDR1
GDSIFSYY

SEQ ID NO: 10679 - protein, 8 aa, Homo sapiens
  Heavy chain CDR1
GFTFSIYG

SEQ ID NO: 10680 - protein, 8 aa, Homo sapiens
  Heavy chain CDR1
GYTFTSYY

SEQ ID NO: 10681 - protein, 8 aa, Homo sapiens
  Heavy chain CDR1
GYTFTSYY

SEQ ID NO: 10682 - protein, 8 aa, Homo sapiens
  Heavy chain CDR1
GDSISSYY

SEQ ID NO: 10683 - protein, 8 aa, Homo sapiens
  Heavy chain CDR1
GFTFGDYA

SEQ ID NO: 10684 - protein, 8 aa, Homo sapiens
  Heavy chain CDR1
GDSISSYY

SEQ ID NO: 10685 - protein, 8 aa, Homo sapiens
  Heavy chain CDR1
GFTFSSYG

SEQ ID NO: 10686 - protein, 8 aa, Homo sapiens
  Heavy chain CDR1
GFTFSSYG

SEQ ID NO: 10687 - protein, 8 aa, Homo sapiens
  Heavy chain CDR1
GFTFSIYG

SEQ ID NO: 10688 - protein, 8 aa, Homo sapiens
  Heavy chain CDR1
GFTFSSYG

SEQ ID NO: 10689 - protein, 8 aa, Homo sapiens
  Heavy chain CDR1
GFTFSIYG

SEQ ID NO: 10690 - protein, 8 aa, Homo sapiens
  Heavy chain CDR1
GFTFSIYG

SEQ ID NO: 10691 - protein, 8 aa, Homo sapiens
  Heavy chain CDR1
GYTLTELS

SEQ ID NO: 10692 - protein, 8 aa, Homo sapiens
  Heavy chain CDR1
GFTFSSYG

SEQ ID NO: 10693 - protein, 8 aa, Homo sapiens
  Heavy chain CDR1
GFTFSIYG

SEQ ID NO: 10694 - protein, 8 aa, Homo sapiens
  Heavy chain CDR1
GYTFTSYY

SEQ ID NO: 10695 - protein, 8 aa, Homo sapiens
  Heavy chain CDR1
GYTFTSYG

SEQ ID NO: 10696 - protein, 8 aa, Homo sapiens
  Heavy chain CDR1
GYTFTSYY

SEQ ID NO: 10697 - protein, 8 aa, Homo sapiens
  Heavy chain CDR1
GYTFTSYY

SEQ ID NO: 10698 - protein, 8 aa, Homo sapiens
  Heavy chain CDR1
GYTFTSYY

SEQ ID NO: 10699 - protein, 8 aa, Homo sapiens
  Heavy chain CDR1
GYTFTSYY

SEQ ID NO: 10700 - protein, 8 aa, Homo sapiens
  Heavy chain CDR1
GYTFTSYY

SEQ ID NO: 10701 - protein, 8 aa, Homo sapiens
  Heavy chain CDR1
GYTFTSYY

SEQ ID NO: 10702 - protein, 8 aa, Homo sapiens
  Heavy chain CDR1
GFTFSSYA

SEQ ID NO: 10703 - protein, 8 aa, Homo sapiens
  Heavy chain CDR1
GYTFTSYY

SEQ ID NO: 10704 - protein, 8 aa, Homo sapiens
  Heavy chain CDR1
GYTFTSYG

SEQ ID NO: 10705 - protein, 8 aa, Homo sapiens
  Heavy chain CDR1
GFTFSSYA

SEQ ID NO: 10706 - protein, 8 aa, Homo sapiens
  Heavy chain CDR1
GYTFTSYY

SEQ ID NO: 10707 - protein, 8 aa, Homo sapiens
  Heavy chain CDR1
GYTFTSYY

SEQ ID NO: 10708 - protein, 8 aa, Homo sapiens
  Heavy chain CDR1
GYTFTSYY

SEQ ID NO: 10709 - protein, 8 aa, Homo sapiens
  Heavy chain CDR1
GFTFGDYA

SEQ ID NO: 10710 - protein, 8 aa, Homo sapiens
  Heavy chain CDR1
GYTFTSYY

SEQ ID NO: 10711 - protein, 8 aa, Homo sapiens
  Heavy chain CDR1
GYTFTSYY

SEQ ID NO: 10712 - protein, 8 aa, Homo sapiens
  Heavy chain CDR1
GYTFTSYY

SEQ ID NO: 10713 - protein, 8 aa, Homo sapiens
  Heavy chain CDR1
GYTFTSYY

SEQ ID NO: 10714 - protein, 8 aa, Homo sapiens
  Heavy chain CDR1
GYTFTSYY

SEQ ID NO: 10715 - protein, 8 aa, Homo sapiens
  Heavy chain CDR1
GYTFTSYY

SEQ ID NO: 10716 - protein, 8 aa, Homo sapiens
  Heavy chain CDR1
GYTFTSYY

SEQ ID NO: 10717 - protein, 8 aa, Homo sapiens
  Heavy chain CDR1
GFTFSSYA

SEQ ID NO: 10718 - protein, 8 aa, Homo sapiens
  Heavy chain CDR1
GYTFTSYG

SEQ ID NO: 10719 - protein, 8 aa, Homo sapiens
  Heavy chain CDR1
GFTFSDYG

SEQ ID NO: 10720 - protein, 10 aa, Homo sapiens
  Heavy chain CDR1
GDSVSSKSVA

SEQ ID NO: 10721 - protein, 8 aa, Homo sapiens
  Heavy chain CDR1
GFTFSDYG

SEQ ID NO: 10722 - protein, 10 aa, Homo sapiens
  Heavy chain CDR1
GDSVSSKSVA

SEQ ID NO: 10723 - protein, 8 aa, Homo sapiens
  Heavy chain CDR1
GFTFSDYG

SEQ ID NO: 10724 - protein, 10 aa, Homo sapiens
  Heavy chain CDR1
GDSVSSKSVA

SEQ ID NO: 10725 - protein, 8 aa, Homo sapiens
  Heavy chain CDR1
GFTFSDYG

SEQ ID NO: 10726 - protein, 10 aa, Homo sapiens
  Heavy chain CDR1
GDSVSSKSVA

SEQ ID NO: 10727 - protein, 10 aa, Homo sapiens
  Heavy chain CDR1
GDSVSSKSVA

SEQ ID NO: 10728 - protein, 8 aa, Homo sapiens
  Heavy chain CDR1
GFTFSDYG

SEQ ID NO: 10729 - protein, 10 aa, Homo sapiens
  Heavy chain CDR1
GDSVSSKSVA

SEQ ID NO: 10730 - protein, 8 aa, Homo sapiens
  Heavy chain CDR1
GFTFSDYG

SEQ ID NO: 10731 - protein, 8 aa, Homo sapiens
  Heavy chain CDR1
GFTFSDSG

SEQ ID NO: 10732 - protein, 8 aa, Homo sapiens
  Heavy chain CDR1
GGSISGHY

SEQ ID NO: 10733 - protein, 8 aa, Homo sapiens
  Heavy chain CDR1
GGSISGYY

SEQ ID NO: 10734 - protein, 8 aa, Homo sapiens
  Heavy chain CDR1
GFTFSSYG

SEQ ID NO: 10735 - protein, 8 aa, Homo sapiens
  Heavy chain CDR1
GFTFSSFG

SEQ ID NO: 10736 - protein, 8 aa, Homo sapiens
  Heavy chain CDR1
GFTFSIYA

SEQ ID NO: 10737 - protein, 8 aa, Homo sapiens
  Heavy chain CDR1
GFTFSNYG

SEQ ID NO: 10738 - protein, 8 aa, Homo sapiens
  Heavy chain CDR1
GFTFSSYG

SEQ ID NO: 10739 - protein, 8 aa, Homo sapiens
  Heavy chain CDR1
GGSISGHY

SEQ ID NO: 10740 - protein, 8 aa, Homo sapiens
  Heavy chain CDR1
GFTFSDSG

SEQ ID NO: 10741 - protein, 8 aa, Homo sapiens
  Heavy chain CDR1
GFTFSDSG

SEQ ID NO: 10742 - protein, 10 aa, Homo sapiens
  Heavy chain CDR1
GDSVSSNSAA

SEQ ID NO: 10743 - protein, 8 aa, Homo sapiens
  Heavy chain CDR1
GFTFSDSG

SEQ ID NO: 10744 - protein, 8 aa, Homo sapiens
  Heavy chain CDR1
GFTFSDSG

SEQ ID NO: 10745 - protein, 8 aa, Homo sapiens
  Heavy chain CDR1
GFTFSDSG

SEQ ID NO: 10746 - protein, 8 aa, Homo sapiens
  Heavy chain CDR1
GFTFSDSG

SEQ ID NO: 10747 - protein, 8 aa, Homo sapiens
  Heavy chain CDR1
GFTFSSYG

SEQ ID NO: 10748 - protein, 8 aa, Homo sapiens
  Heavy chain CDR1
GFTFSDSG

SEQ ID NO: 10749 - protein, 8 aa, Homo sapiens
  Heavy chain CDR1
GFTFSDSG

SEQ ID NO: 10750 - protein, 8 aa, Homo sapiens
  Heavy chain CDR1
GFTFSDSG

SEQ ID NO: 10751 - protein, 8 aa, Homo sapiens
  Heavy chain CDR1
GYTFTSYG

SEQ ID NO: 10752 - protein, 8 aa, Homo sapiens
  Heavy chain CDR1
GYTFTSYG

SEQ ID NO: 10753 - protein, 8 aa, Homo sapiens
  Heavy chain CDR1
GFTFDDYG

SEQ ID NO: 10754 - protein, 8 aa, Homo sapiens
  Heavy chain CDR1
GFTFDDYG

SEQ ID NO: 10755 - protein, 10 aa, Homo sapiens
  Heavy chain CDR1
GGSISSSSYY

SEQ ID NO: 10756 - protein, 8 aa, Homo sapiens
  Heavy chain CDR1
GYTFTSYG

SEQ ID NO: 10757 - protein, 8 aa, Homo sapiens
  Heavy chain CDR1
GYTFTSYG

SEQ ID NO: 10758 - protein, 8 aa, Homo sapiens
  Heavy chain CDR1
GYTFTSYG

SEQ ID NO: 10759 - protein, 8 aa, Homo sapiens
  Heavy chain CDR1
GFTFDDYG

SEQ ID NO: 10760 - protein, 8 aa, Homo sapiens
  Heavy chain CDR1
GYTFTSYG

SEQ ID NO: 10761 - protein, 8 aa, Homo sapiens
  Heavy chain CDR1
GYTFTSYG

SEQ ID NO: 10762 - protein, 8 aa, Homo sapiens
  Heavy chain CDR1
GYTFTSYG

SEQ ID NO: 10763 - protein, 8 aa, Homo sapiens
  Heavy chain CDR1
GYTFTSYG

SEQ ID NO: 10764 - protein, 8 aa, Homo sapiens
  Heavy chain CDR1
GYTFTSYG

SEQ ID NO: 10765 - protein, 8 aa, Homo sapiens
  Heavy chain CDR1
GYTFTSYG

SEQ ID NO: 10766 - protein, 8 aa, Homo sapiens
  Heavy chain CDR1
GFTFDDYG

SEQ ID NO: 10767 - protein, 8 aa, Homo sapiens
  Heavy chain CDR1
GYTFTSYG

SEQ ID NO: 10768 - protein, 8 aa, Homo sapiens
  Heavy chain CDR1
GYTFTSYG

SEQ ID NO: 10769 - protein, 8 aa, Homo sapiens
  Heavy chain CDR1
GYTFTSYG

SEQ ID NO: 10770 - protein, 8 aa, Homo sapiens
  Heavy chain CDR1
GYTFTSYG

SEQ ID NO: 10771 - protein, 8 aa, Homo sapiens
  Heavy chain CDR1
GYTFTSYG

SEQ ID NO: 10772 - protein, 8 aa, Homo sapiens
  Heavy chain CDR1
GYTFTSYG

SEQ ID NO: 10773 - protein, 8 aa, Homo sapiens
  Heavy chain CDR1
GYTFTSYG

SEQ ID NO: 10774 - protein, 8 aa, Homo sapiens
  Heavy chain CDR1
GYTFTSYG

SEQ ID NO: 10775 - protein, 8 aa, Homo sapiens
  Heavy chain CDR1
GYTFTSYG

SEQ ID NO: 10776 - protein, 8 aa, Homo sapiens
  Heavy chain CDR1
GFTFDDYG

SEQ ID NO: 10777 - protein, 8 aa, Homo sapiens
  Heavy chain CDR1
GFTFDDYG

SEQ ID NO: 10778 - protein, 8 aa, Homo sapiens
  Heavy chain CDR1
GFTFDDYG

SEQ ID NO: 10779 - protein, 8 aa, Homo sapiens
  Heavy chain CDR1
GYTFTSYG

SEQ ID NO: 10780 - protein, 8 aa, Homo sapiens
  Heavy chain CDR1
GFTFSSYG

SEQ ID NO: 10781 - protein, 8 aa, Homo sapiens
  Heavy chain CDR1
GYTFTSYD

SEQ ID NO: 10782 - protein, 8 aa, Homo sapiens
  Heavy chain CDR1
GFTFSNYG

SEQ ID NO: 10783 - protein, 8 aa, Homo sapiens
  Heavy chain CDR1
GFTFSFYD

SEQ ID NO: 10784 - protein, 8 aa, Homo sapiens
  Heavy chain CDR1
GFTFNNFG

SEQ ID NO: 10785 - protein, 8 aa, Homo sapiens
  Heavy chain CDR1
GYTFTSYY

SEQ ID NO: 10786 - protein, 8 aa, Homo sapiens
  Heavy chain CDR1
GFTFSSYG

SEQ ID NO: 10787 - protein, 8 aa, Homo sapiens
  Heavy chain CDR1
GFTFSNYG

SEQ ID NO: 10788 - protein, 8 aa, Homo sapiens
  Heavy chain CDR1
GFTFSNYG

SEQ ID NO: 10789 - protein, 8 aa, Homo sapiens
  Heavy chain CDR1
GFTFNNFG

SEQ ID NO: 10790 - protein, 8 aa, Homo sapiens
  Heavy chain CDR1
GYTFTSYD

SEQ ID NO: 10791 - protein, 8 aa, Homo sapiens
  Heavy chain CDR1
GFTFSNYG

SEQ ID NO: 10792 - protein, 8 aa, Homo sapiens
  Heavy chain CDR1
GYTFTSYD

SEQ ID NO: 10793 - protein, 8 aa, Homo sapiens
  Heavy chain CDR1
GFTFSNYG

SEQ ID NO: 10794 - protein, 8 aa, Homo sapiens
  Heavy chain CDR1
GFTFSNYG

SEQ ID NO: 10795 - protein, 8 aa, Homo sapiens
  Heavy chain CDR1
GYTFTSYY

SEQ ID NO: 10796 - protein, 8 aa, Homo sapiens
  Heavy chain CDR1
GFTFSNYG

SEQ ID NO: 10797 - protein, 8 aa, Homo sapiens
  Heavy chain CDR1
GFTFSNYG

SEQ ID NO: 10798 - protein, 8 aa, Homo sapiens
  Heavy chain CDR1
GFTFNNFG

SEQ ID NO: 10799 - protein, 8 aa, Homo sapiens
  Heavy chain CDR1
GFTFSNYG

SEQ ID NO: 10800 - protein, 8 aa, Homo sapiens
  Heavy chain CDR1
GFTFSSYG

SEQ ID NO: 10801 - protein, 8 aa, Homo sapiens
  Heavy chain CDR1
GFTFSSYG

SEQ ID NO: 10802 - protein, 8 aa, Homo sapiens
  Heavy chain CDR1
GFTFSSYG

SEQ ID NO: 10803 - protein, 8 aa, Homo sapiens
  Heavy chain CDR1
GYTFTSYD

SEQ ID NO: 10804 - protein, 8 aa, Homo sapiens
  Heavy chain CDR1
GFTFSSYG

SEQ ID NO: 10805 - protein, 8 aa, Homo sapiens
  Heavy chain CDR1
GFTFSNYG

SEQ ID NO: 10806 - protein, 8 aa, Homo sapiens
  Heavy chain CDR1
GYTFTSYD

SEQ ID NO: 10807 - protein, 8 aa, Homo sapiens
  Heavy chain CDR1
GFTFSNYG

SEQ ID NO: 10808 - protein, 8 aa, Homo sapiens
  Heavy chain CDR1
GFTFNNFG

SEQ ID NO: 10809 - protein, 10 aa, Homo sapiens
  Heavy chain CDR1
GGSISSSSYF

SEQ ID NO: 10810 - protein, 8 aa, Homo sapiens
  Heavy chain CDR1
GFTFSTYG

SEQ ID NO: 10811 - protein, 8 aa, Homo sapiens
  Heavy chain CDR1
GFTFSNYG

SEQ ID NO: 10812 - protein, 8 aa, Homo sapiens
  Heavy chain CDR1
GFTFSNYG

SEQ ID NO: 10813 - protein, 8 aa, Homo sapiens
  Heavy chain CDR1
GFTFSNYG

SEQ ID NO: 10814 - protein, 8 aa, Homo sapiens
  Heavy chain CDR1
GYTFTSYD

SEQ ID NO: 10815 - protein, 8 aa, Homo sapiens
  Heavy chain CDR1
GFTFSFYD

SEQ ID NO: 10816 - protein, 8 aa, Homo sapiens
  Heavy chain CDR1
GFTFSSYG

SEQ ID NO: 10817 - protein, 8 aa, Homo sapiens
  Heavy chain CDR1
GFTFSSYG

SEQ ID NO: 10818 - protein, 8 aa, Homo sapiens
  Heavy chain CDR1
GFTFSSYG

SEQ ID NO: 10819 - protein, 8 aa, Homo sapiens
  Heavy chain CDR1
GFTFSSYG

SEQ ID NO: 10820 - protein, 8 aa, Homo sapiens
  Heavy chain CDR1
GFTFNNFG

SEQ ID NO: 10821 - protein, 8 aa, Homo sapiens
  Heavy chain CDR1
GYTFTSYD

SEQ ID NO: 10822 - protein, 8 aa, Homo sapiens
  Heavy chain CDR1
GYTLTELS

SEQ ID NO: 10823 - protein, 8 aa, Homo sapiens
  Heavy chain CDR1
GFTFSNYG

SEQ ID NO: 10824 - protein, 8 aa, Homo sapiens
  Heavy chain CDR1
GFTFSFYD

SEQ ID NO: 10825 - protein, 8 aa, Homo sapiens
  Heavy chain CDR1
GFTFSSYG

SEQ ID NO: 10826 - protein, 8 aa, Homo sapiens
  Heavy chain CDR1
GYTFTNYG

SEQ ID NO: 10827 - protein, 8 aa, Homo sapiens
  Heavy chain CDR1
GFTFSSYG

SEQ ID NO: 10828 - protein, 8 aa, Homo sapiens
  Heavy chain CDR1
GFTFSSYG

SEQ ID NO: 10829 - protein, 8 aa, Homo sapiens
  Heavy chain CDR1
GFTFSFYD

SEQ ID NO: 10830 - protein, 8 aa, Homo sapiens
  Heavy chain CDR1
GFTFSNYG

SEQ ID NO: 10831 - protein, 8 aa, Homo sapiens
  Heavy chain CDR1
GFTFSNFG

SEQ ID NO: 10832 - protein, 8 aa, Homo sapiens
  Heavy chain CDR1
GGSISSYY

SEQ ID NO: 10833 - protein, 8 aa, Homo sapiens
  Heavy chain CDR1
GFTFSSYG

SEQ ID NO: 10834 - protein, 8 aa, Homo sapiens
  Heavy chain CDR1
GGSISSYY

SEQ ID NO: 10835 - protein, 8 aa, Homo sapiens
  Heavy chain CDR1
GFTFSSYG

SEQ ID NO: 10836 - protein, 8 aa, Homo sapiens
  Heavy chain CDR1
GFTFSNYG

SEQ ID NO: 10837 - protein, 8 aa, Homo sapiens
  Heavy chain CDR1
GFTFSSYG

SEQ ID NO: 10838 - protein, 8 aa, Homo sapiens
  Heavy chain CDR1
GFTFSNFG

SEQ ID NO: 10839 - protein, 8 aa, Homo sapiens
  Heavy chain CDR1
GFTFSDYG

SEQ ID NO: 10840 - protein, 8 aa, Homo sapiens
  Heavy chain CDR1
GGSFSDYY

SEQ ID NO: 10841 - protein, 8 aa, Homo sapiens
  Heavy chain CDR1
GFTFSSYG

SEQ ID NO: 10842 - protein, 8 aa, Homo sapiens
  Heavy chain CDR1
GGSISSYY

SEQ ID NO: 10843 - protein, 8 aa, Homo sapiens
  Heavy chain CDR1
GFTFSNFG

SEQ ID NO: 10844 - protein, 8 aa, Homo sapiens
  Heavy chain CDR1
GFTFSNFG

SEQ ID NO: 10845 - protein, 8 aa, Homo sapiens
  Heavy chain CDR1
GFIFSSYG

SEQ ID NO: 10846 - protein, 8 aa, Homo sapiens
  Heavy chain CDR1
GFTFSSYG

SEQ ID NO: 10847 - protein, 8 aa, Homo sapiens
  Heavy chain CDR1
GFTFSSYG

SEQ ID NO: 10848 - protein, 8 aa, Homo sapiens
  Heavy chain CDR1
GGSISSYY

SEQ ID NO: 10849 - protein, 8 aa, Homo sapiens
  Heavy chain CDR1
GFTFSNYG

SEQ ID NO: 10850 - protein, 8 aa, Homo sapiens
  Heavy chain CDR1
GFTFSNFG

SEQ ID NO: 10851 - protein, 8 aa, Homo sapiens
  Heavy chain CDR1
GGSISSYY

SEQ ID NO: 10852 - protein, 8 aa, Homo sapiens
  Heavy chain CDR1
GFTFSDYY

SEQ ID NO: 10853 - protein, 8 aa, Homo sapiens
  Heavy chain CDR1
GFTFSNFG

SEQ ID NO: 10854 - protein, 8 aa, Homo sapiens
  Heavy chain CDR1
GGSISSYY

SEQ ID NO: 10855 - protein, 8 aa, Homo sapiens
  Heavy chain CDR1
GFTFSSYG

SEQ ID NO: 10856 - protein, 8 aa, Homo sapiens
  Heavy chain CDR1
GGSISSYY

SEQ ID NO: 10857 - protein, 10 aa, Homo sapiens
  Heavy chain CDR1
GDSVSSNSAA

SEQ ID NO: 10858 - protein, 8 aa, Homo sapiens
  Heavy chain CDR1
GGSISSYY

SEQ ID NO: 10859 - protein, 8 aa, Homo sapiens
  Heavy chain CDR1
GGSISSYY

SEQ ID NO: 10860 - protein, 8 aa, Homo sapiens
  Heavy chain CDR1
GGSISSYY

SEQ ID NO: 10861 - protein, 8 aa, Homo sapiens
  Heavy chain CDR1
GFTFSSYG

SEQ ID NO: 10862 - protein, 8 aa, Homo sapiens
  Heavy chain CDR1
GFTFSNFG

SEQ ID NO: 10863 - protein, 8 aa, Homo sapiens
  Heavy chain CDR1
GFTFSDYG

SEQ ID NO: 10864 - protein, 8 aa, Homo sapiens
  Heavy chain CDR1
GGSISSYY

SEQ ID NO: 10865 - protein, 8 aa, Homo sapiens
  Heavy chain CDR1
GGSISSYY

SEQ ID NO: 10866 - protein, 8 aa, Homo sapiens
  Heavy chain CDR1
GFTFNNYG

SEQ ID NO: 10867 - protein, 8 aa, Homo sapiens
  Heavy chain CDR1
GGSISSYY

SEQ ID NO: 10868 - protein, 8 aa, Homo sapiens
  Heavy chain CDR1
GFTFSNFG

SEQ ID NO: 10869 - protein, 8 aa, Homo sapiens
  Heavy chain CDR1
GFTFSNFG

SEQ ID NO: 10870 - protein, 8 aa, Homo sapiens
  Heavy chain CDR1
GGSISSYY

SEQ ID NO: 10871 - protein, 8 aa, Homo sapiens
  Heavy chain CDR1
GYTFTSYG

SEQ ID NO: 10872 - protein, 8 aa, Homo sapiens
  Heavy chain CDR1
GFTFSSYG

SEQ ID NO: 10873 - protein, 8 aa, Homo sapiens
  Heavy chain CDR1
GFTFSNYG

SEQ ID NO: 10874 - protein, 8 aa, Homo sapiens
  Heavy chain CDR1
GYTFPSYG

SEQ ID NO: 10875 - protein, 8 aa, Homo sapiens
  Heavy chain CDR1
GYTFTTYG

SEQ ID NO: 10876 - protein, 8 aa, Homo sapiens
  Heavy chain CDR1
GFTFSSYG

SEQ ID NO: 10877 - protein, 8 aa, Homo sapiens
  Heavy chain CDR1
GFTFSSYA

SEQ ID NO: 10878 - protein, 8 aa, Homo sapiens
  Heavy chain CDR1
GYTFTSYG

SEQ ID NO: 10879 - protein, 8 aa, Homo sapiens
  Heavy chain CDR1
GGSISSYY

SEQ ID NO: 10880 - protein, 8 aa, Homo sapiens
  Heavy chain CDR1
GGSISSYY

SEQ ID NO: 10881 - protein, 8 aa, Homo sapiens
  Heavy chain CDR1
GYTFTSYG

SEQ ID NO: 10882 - protein, 8 aa, Homo sapiens
  Heavy chain CDR1
GYTFTSYG

SEQ ID NO: 10883 - protein, 8 aa, Homo sapiens
  Heavy chain CDR1
GYTFTSYG

SEQ ID NO: 10884 - protein, 8 aa, Homo sapiens
  Heavy chain CDR1
GYTFTSYG

SEQ ID NO: 10885 - protein, 8 aa, Homo sapiens
  Heavy chain CDR1
GYTFTSYG

SEQ ID NO: 10886 - protein, 8 aa, Homo sapiens
  Heavy chain CDR1
GYTFTTYG

SEQ ID NO: 10887 - protein, 8 aa, Homo sapiens
  Heavy chain CDR1
GYTFTSYG

SEQ ID NO: 10888 - protein, 8 aa, Homo sapiens
  Heavy chain CDR1
GYTFTSYG

SEQ ID NO: 10889 - protein, 8 aa, Homo sapiens
  Heavy chain CDR1
GYTFTSYG

SEQ ID NO: 10890 - protein, 8 aa, Homo sapiens
  Heavy chain CDR1
GYTFTSYG

SEQ ID NO: 10891 - protein, 8 aa, Homo sapiens
  Heavy chain CDR1
GYTFTSYG

SEQ ID NO: 10892 - protein, 8 aa, Homo sapiens
  Heavy chain CDR1
GYTFTSYG

SEQ ID NO: 10893 - protein, 8 aa, Homo sapiens
  Heavy chain CDR1
GYTFTSYG

SEQ ID NO: 10894 - protein, 8 aa, Homo sapiens
  Heavy chain CDR1
GFTFSSYG

SEQ ID NO: 10895 - protein, 8 aa, Homo sapiens
  Heavy chain CDR1
GYTFTTYG

SEQ ID NO: 10896 - protein, 8 aa, Homo sapiens
  Heavy chain CDR1
GYTFTSYG

SEQ ID NO: 10897 - protein, 8 aa, Homo sapiens
  Heavy chain CDR1
GYTFTSYG

SEQ ID NO: 10898 - protein, 8 aa, Homo sapiens
  Heavy chain CDR1
GFTFSSYG

SEQ ID NO: 10899 - protein, 8 aa, Homo sapiens
  Heavy chain CDR1
GYTFTSYG

SEQ ID NO: 10900 - protein, 8 aa, Homo sapiens
  Heavy chain CDR1
GYTFTSYG

SEQ ID NO: 10901 - protein, 8 aa, Homo sapiens
  Heavy chain CDR1
GFTFSNYG

SEQ ID NO: 10902 - protein, 8 aa, Homo sapiens
  Heavy chain CDR1
GYTLNSYG

SEQ ID NO: 10903 - protein, 8 aa, Homo sapiens
  Heavy chain CDR1
GGSINNYY

SEQ ID NO: 10904 - protein, 8 aa, Homo sapiens
  Heavy chain CDR1
GYTFTSYG

SEQ ID NO: 10905 - protein, 8 aa, Homo sapiens
  Heavy chain CDR1
GYTFTSYG

SEQ ID NO: 10906 - protein, 8 aa, Homo sapiens
  Heavy chain CDR1
GGSISSYY

SEQ ID NO: 10907 - protein, 8 aa, Homo sapiens
  Heavy chain CDR1
GYTLNSYG

SEQ ID NO: 10908 - protein, 8 aa, Homo sapiens
  Heavy chain CDR1
GGSINNYY

SEQ ID NO: 10909 - protein, 8 aa, Homo sapiens
  Heavy chain CDR1
GGSINNYY

SEQ ID NO: 10910 - protein, 8 aa, Homo sapiens
  Heavy chain CDR1
GYTFTSYG

SEQ ID NO: 10911 - protein, 8 aa, Homo sapiens
  Heavy chain CDR1
GYTFTSYG

SEQ ID NO: 10912 - protein, 8 aa, Homo sapiens
  Heavy chain CDR1
GGSINNYY

SEQ ID NO: 10913 - protein, 8 aa, Homo sapiens
  Heavy chain CDR1
GFTFSSYG

SEQ ID NO: 10914 - protein, 8 aa, Homo sapiens
  Heavy chain CDR1
GYTFTSYG

SEQ ID NO: 10915 - protein, 8 aa, Homo sapiens
  Heavy chain CDR1
GGSINNYY

SEQ ID NO: 10916 - protein, 8 aa, Homo sapiens
  Heavy chain CDR1
GYTFTSYG

SEQ ID NO: 10917 - protein, 8 aa, Homo sapiens
  Heavy chain CDR1
GYTFTSYG

SEQ ID NO: 10918 - protein, 8 aa, Homo sapiens
  Heavy chain CDR1
GGSINNYY

SEQ ID NO: 10919 - protein, 8 aa, Homo sapiens
  Heavy chain CDR1
GFTFSSYA

SEQ ID NO: 10920 - protein, 8 aa, Homo sapiens
  Heavy chain CDR1
GYTFTSYY

SEQ ID NO: 10921 - protein, 8 aa, Homo sapiens
  Heavy chain CDR1
GGSINNYY

SEQ ID NO: 10922 - protein, 8 aa, Homo sapiens
  Heavy chain CDR1
GYTFTSYG

SEQ ID NO: 10923 - protein, 8 aa, Homo sapiens
  Heavy chain CDR1
GYTFTSYY

SEQ ID NO: 10924 - protein, 8 aa, Homo sapiens
  Heavy chain CDR1
GYTFTSYY

SEQ ID NO: 10925 - protein, 8 aa, Homo sapiens
  Heavy chain CDR1
GYTFTSYG

SEQ ID NO: 10926 - protein, 8 aa, Homo sapiens
  Heavy chain CDR1
GFTFSNYG

SEQ ID NO: 10927 - protein, 8 aa, Homo sapiens
  Heavy chain CDR1
GGSINNYY

SEQ ID NO: 10928 - protein, 8 aa, Homo sapiens
  Heavy chain CDR1
GFTFSSYG

SEQ ID NO: 10929 - protein, 8 aa, Homo sapiens
  Heavy chain CDR1
GFTFSNYG

SEQ ID NO: 10930 - protein, 8 aa, Homo sapiens
  Heavy chain CDR1
GFTFSSYG

SEQ ID NO: 10931 - protein, 8 aa, Homo sapiens
  Heavy chain CDR1
GFTFSNYG

SEQ ID NO: 10932 - protein, 8 aa, Homo sapiens
  Heavy chain CDR1
GFTFSNYG

SEQ ID NO: 10933 - protein, 8 aa, Homo sapiens
  Heavy chain CDR1
GFTFSNYG

SEQ ID NO: 10934 - protein, 8 aa, Homo sapiens
  Heavy chain CDR1
GFTFSNYG

SEQ ID NO: 10935 - protein, 8 aa, Homo sapiens
  Heavy chain CDR1
GFTFSNYG

SEQ ID NO: 10936 - protein, 8 aa, Homo sapiens
  Heavy chain CDR1
GFTFSSYG

SEQ ID NO: 10937 - protein, 8 aa, Homo sapiens
  Heavy chain CDR1
GFTFSNAW

SEQ ID NO: 10938 - protein, 8 aa, Homo sapiens
  Heavy chain CDR1
GFTFSSYA

SEQ ID NO: 10939 - protein, 8 aa, Homo sapiens
  Heavy chain CDR1
GYTFTSYG

SEQ ID NO: 10940 - protein, 8 aa, Homo sapiens
  Heavy chain CDR1
GFTFSSYA

SEQ ID NO: 10941 - protein, 8 aa, Homo sapiens
  Heavy chain CDR1
GFTFSDYY

SEQ ID NO: 10942 - protein, 8 aa, Homo sapiens
  Heavy chain CDR1
GYTFTSYD

SEQ ID NO: 10943 - protein, 8 aa, Homo sapiens
  Heavy chain CDR1
GFTFSSYG

SEQ ID NO: 10944 - protein, 8 aa, Homo sapiens
  Heavy chain CDR1
GFTFSSYG

SEQ ID NO: 10945 - protein, 8 aa, Homo sapiens
  Heavy chain CDR1
GFTFSSYG

SEQ ID NO: 10946 - protein, 8 aa, Homo sapiens
  Heavy chain CDR1
GGSISSYY

SEQ ID NO: 10947 - protein, 8 aa, Homo sapiens
  Heavy chain CDR1
GFTFSSYG

SEQ ID NO: 10948 - protein, 8 aa, Homo sapiens
  Heavy chain CDR1
GFTFSDYY

SEQ ID NO: 10949 - protein, 8 aa, Homo sapiens
  Heavy chain CDR1
GFTFSDYY

SEQ ID NO: 10950 - protein, 8 aa, Homo sapiens
  Heavy chain CDR1
GFTFSDYY

SEQ ID NO: 10951 - protein, 8 aa, Homo sapiens
  Heavy chain CDR1
GGSISSYY

SEQ ID NO: 10952 - protein, 8 aa, Homo sapiens
  Heavy chain CDR1
RFTFSNYG

SEQ ID NO: 10953 - protein, 8 aa, Homo sapiens
  Heavy chain CDR1
GYTFATYG

SEQ ID NO: 10954 - protein, 8 aa, Homo sapiens
  Heavy chain CDR1
GFTFSNYG

SEQ ID NO: 10955 - protein, 8 aa, Homo sapiens
  Heavy chain CDR1
GYTFATYG

SEQ ID NO: 10956 - protein, 8 aa, Homo sapiens
  Heavy chain CDR1
GFTFSNYG

SEQ ID NO: 10957 - protein, 8 aa, Homo sapiens
  Heavy chain CDR1
GFTFSSYG

SEQ ID NO: 10958 - protein, 8 aa, Homo sapiens
  Heavy chain CDR1
GFTFSDYG

SEQ ID NO: 10959 - protein, 8 aa, Homo sapiens
  Heavy chain CDR1
GFTFSNYG

SEQ ID NO: 10960 - protein, 8 aa, Homo sapiens
  Heavy chain CDR1
GFTFSNYG

SEQ ID NO: 10961 - protein, 8 aa, Homo sapiens
  Heavy chain CDR1
GFTFSDYG

SEQ ID NO: 10962 - protein, 8 aa, Homo sapiens
  Heavy chain CDR1
GFTFSNYG

SEQ ID NO: 10963 - protein, 8 aa, Homo sapiens
  Heavy chain CDR1
GYTLTELS

SEQ ID NO: 10964 - protein, 8 aa, Homo sapiens
  Heavy chain CDR1
GFTFSSYG

SEQ ID NO: 10965 - protein, 8 aa, Homo sapiens
  Heavy chain CDR1
GFTFSSYA

SEQ ID NO: 10966 - protein, 8 aa, Homo sapiens
  Heavy chain CDR1
GYTFTSYY

SEQ ID NO: 10967 - protein, 8 aa, Homo sapiens
  Heavy chain CDR1
GFTFGDYA

SEQ ID NO: 10968 - protein, 8 aa, Homo sapiens
  Heavy chain CDR1
GFTFSSYG

SEQ ID NO: 10969 - protein, 8 aa, Homo sapiens
  Heavy chain CDR1
GFTFSNYG

SEQ ID NO: 10970 - protein, 8 aa, Homo sapiens
  Heavy chain CDR1
GFTFSNYG

SEQ ID NO: 10971 - protein, 8 aa, Homo sapiens
  Heavy chain CDR1
GFTFSNYG

SEQ ID NO: 10972 - protein, 8 aa, Homo sapiens
  Heavy chain CDR1
GFTFSNYG

SEQ ID NO: 10973 - protein, 8 aa, Homo sapiens
  Heavy chain CDR1
GFTFSNYG

SEQ ID NO: 10974 - protein, 8 aa, Homo sapiens
  Heavy chain CDR1
GFTFSNYG

SEQ ID NO: 10975 - protein, 8 aa, Homo sapiens
  Heavy chain CDR1
GFTFSNYG

SEQ ID NO: 10976 - protein, 8 aa, Homo sapiens
  Heavy chain CDR1
GFTFSSYG

SEQ ID NO: 10977 - protein, 8 aa, Homo sapiens
  Heavy chain CDR1
GFTFSNYG

SEQ ID NO: 10978 - protein, 8 aa, Homo sapiens
  Heavy chain CDR1
GFTFSNYG

SEQ ID NO: 10979 - protein, 8 aa, Homo sapiens
  Heavy chain CDR1
GFTFSNYG

SEQ ID NO: 10980 - protein, 8 aa, Homo sapiens
  Heavy chain CDR1
GFTFSNYG

SEQ ID NO: 10981 - protein, 8 aa, Homo sapiens
  Heavy chain CDR1
GFTFSSYG

SEQ ID NO: 10982 - protein, 8 aa, Homo sapiens
  Heavy chain CDR1
GFTFSNYG

SEQ ID NO: 10983 - protein, 8 aa, Homo sapiens
  Heavy chain CDR1
GFTFSNYG

SEQ ID NO: 10984 - protein, 8 aa, Homo sapiens
  Heavy chain CDR1
GFTFSNYG

SEQ ID NO: 10985 - protein, 8 aa, Homo sapiens
  Heavy chain CDR1
GFTFSSYG

SEQ ID NO: 10986 - protein, 8 aa, Homo sapiens
  Heavy chain CDR1
GFTFSSYG

SEQ ID NO: 10987 - protein, 8 aa, Homo sapiens
  Heavy chain CDR1
GFTFSSYG

SEQ ID NO: 10988 - protein, 8 aa, Homo sapiens
  Heavy chain CDR1
GFTFSSYG

SEQ ID NO: 10989 - protein, 8 aa, Homo sapiens
  Heavy chain CDR1
GFTFSSYG

SEQ ID NO: 10990 - protein, 8 aa, Homo sapiens
  Heavy chain CDR1
GFTFSSYG

SEQ ID NO: 10991 - protein, 8 aa, Homo sapiens
  Heavy chain CDR1
GFTFSSYG

SEQ ID NO: 10992 - protein, 8 aa, Homo sapiens
  Heavy chain CDR1
GFTFSSYG

SEQ ID NO: 10993 - protein, 8 aa, Homo sapiens
  Heavy chain CDR1
GFTFSSYG

SEQ ID NO: 10994 - protein, 8 aa, Homo sapiens
  Heavy chain CDR1
GFTFSSYG

SEQ ID NO: 10995 - protein, 8 aa, Homo sapiens
  Heavy chain CDR1
GFTFSSYG

SEQ ID NO: 10996 - protein, 8 aa, Homo sapiens
  Heavy chain CDR1
GFTFSSYG

SEQ ID NO: 10997 - protein, 8 aa, Homo sapiens
  Heavy chain CDR1
GFTFSSYG

SEQ ID NO: 10998 - protein, 8 aa, Homo sapiens
  Heavy chain CDR1
GFTFSSYG

SEQ ID NO: 10999 - protein, 8 aa, Homo sapiens
  Heavy chain CDR1
GYTLTELS

SEQ ID NO: 11000 - protein, 8 aa, Homo sapiens
  Heavy chain CDR1
GFTFSNYG

SEQ ID NO: 11001 - protein, 8 aa, Homo sapiens
  Heavy chain CDR1
GFTFSSYG

SEQ ID NO: 11002 - protein, 8 aa, Homo sapiens
  Heavy chain CDR1
GFTFSNYG

SEQ ID NO: 11003 - protein, 8 aa, Homo sapiens
  Heavy chain CDR1
GFTFSDYG

SEQ ID NO: 11004 - protein, 8 aa, Homo sapiens
  Heavy chain CDR1
GFTFSDYG

SEQ ID NO: 11005 - protein, 8 aa, Homo sapiens
  Heavy chain CDR1
GFTFSDYG

SEQ ID NO: 11006 - protein, 8 aa, Homo sapiens
  Heavy chain CDR1
GFTFSDYG

SEQ ID NO: 11007 - protein, 8 aa, Homo sapiens
  Heavy chain CDR1
GFTFSDYG

SEQ ID NO: 11008 - protein, 8 aa, Homo sapiens
  Heavy chain CDR1
GFTFSDYG

SEQ ID NO: 11009 - protein, 8 aa, Homo sapiens
  Heavy chain CDR1
GFTFSDYG

SEQ ID NO: 11010 - protein, 8 aa, Homo sapiens
  Heavy chain CDR1
GFTFSDYG

SEQ ID NO: 11011 - protein, 8 aa, Homo sapiens
  Heavy chain CDR1
GFTFSNYG

SEQ ID NO: 11012 - protein, 8 aa, Homo sapiens
  Heavy chain CDR1
GFTFSDYG

SEQ ID NO: 11013 - protein, 8 aa, Homo sapiens
  Heavy chain CDR1
GFTFSNYG

SEQ ID NO: 11014 - protein, 8 aa, Homo sapiens
  Heavy chain CDR1
GFTFSSYG

SEQ ID NO: 11015 - protein, 8 aa, Homo sapiens
  Heavy chain CDR1
GFTFSDYG

SEQ ID NO: 11016 - protein, 8 aa, Homo sapiens
  Heavy chain CDR1
GFTFSNYG

SEQ ID NO: 11017 - protein, 8 aa, Homo sapiens
  Heavy chain CDR1
GFTFSNYG

SEQ ID NO: 11018 - protein, 8 aa, Homo sapiens
  Heavy chain CDR1
GFTFSNYG

SEQ ID NO: 11019 - protein, 8 aa, Homo sapiens
  Heavy chain CDR1
GFTFSNYG

SEQ ID NO: 11020 - protein, 8 aa, Homo sapiens
  Heavy chain CDR1
GFTFSNYG

SEQ ID NO: 11021 - protein, 8 aa, Homo sapiens
  Heavy chain CDR1
GFTFSNYG

SEQ ID NO: 11022 - protein, 8 aa, Homo sapiens
  Heavy chain CDR1
GFTFSNYG

SEQ ID NO: 11023 - protein, 8 aa, Homo sapiens
  Heavy chain CDR1
GFTFSNYG

SEQ ID NO: 11024 - protein, 8 aa, Homo sapiens
  Heavy chain CDR1
GFTFSNYG

SEQ ID NO: 11025 - protein, 8 aa, Homo sapiens
  Heavy chain CDR1
GFTFSNYG

SEQ ID NO: 11026 - protein, 8 aa, Homo sapiens
  Heavy chain CDR1
GFTFSNYG

SEQ ID NO: 11027 - protein, 8 aa, Homo sapiens
  Heavy chain CDR1
GFTFSNYG

SEQ ID NO: 11028 - protein, 8 aa, Homo sapiens
  Heavy chain CDR1
GFTFSNYG

SEQ ID NO: 11029 - protein, 8 aa, Homo sapiens
  Heavy chain CDR1
GFTFSNYG

SEQ ID NO: 11030 - protein, 8 aa, Homo sapiens
  Heavy chain CDR1
GFTFSNYG

SEQ ID NO: 11031 - protein, 8 aa, Homo sapiens
  Heavy chain CDR1
GFTFSNYG

SEQ ID NO: 11032 - protein, 8 aa, Homo sapiens
  Heavy chain CDR1
GFTFSNYG

SEQ ID NO: 11033 - protein, 8 aa, Homo sapiens
  Heavy chain CDR1
GFTFSNYG

SEQ ID NO: 11034 - protein, 8 aa, Homo sapiens
  Heavy chain CDR1
GFTFSNYG

SEQ ID NO: 11035 - protein, 8 aa, Homo sapiens
  Heavy chain CDR1
GFTFSNYG

SEQ ID NO: 11036 - protein, 8 aa, Homo sapiens
  Heavy chain CDR1
GFTFSNYG

SEQ ID NO: 11037 - protein, 8 aa, Homo sapiens
  Heavy chain CDR1
GFTFSNYG

SEQ ID NO: 11038 - protein, 8 aa, Homo sapiens
  Heavy chain CDR1
GFTFSNYG

SEQ ID NO: 11039 - protein, 8 aa, Homo sapiens
  Heavy chain CDR1
GFTFSNYG

SEQ ID NO: 11040 - protein, 8 aa, Homo sapiens
  Heavy chain CDR1
GFTFSNYG

SEQ ID NO: 11041 - protein, 8 aa, Homo sapiens
  Heavy chain CDR1
GFTFSSYG

SEQ ID NO: 11042 - protein, 8 aa, Homo sapiens
  Heavy chain CDR1
GFTFSNYG

SEQ ID NO: 11043 - protein, 8 aa, Homo sapiens
  Heavy chain CDR1
GFTFSNYG

SEQ ID NO: 11044 - protein, 8 aa, Homo sapiens
  Heavy chain CDR1
GFTFSNYG

SEQ ID NO: 11045 - protein, 8 aa, Homo sapiens
  Heavy chain CDR1
GFTFSNYG

SEQ ID NO: 11046 - protein, 8 aa, Homo sapiens
  Heavy chain CDR1
GFTFSNYG

SEQ ID NO: 11047 - protein, 8 aa, Homo sapiens
  Heavy chain CDR1
GYTFATYG

SEQ ID NO: 11048 - protein, 8 aa, Homo sapiens
  Heavy chain CDR1
GFTFSNYG

SEQ ID NO: 11049 - protein, 8 aa, Homo sapiens
  Heavy chain CDR1
GFTFSNYG

SEQ ID NO: 11050 - protein, 8 aa, Homo sapiens
  Heavy chain CDR1
GYTFATYG

SEQ ID NO: 11051 - protein, 8 aa, Homo sapiens
  Heavy chain CDR1
GFTFSSYG

SEQ ID NO: 11052 - protein, 8 aa, Homo sapiens
  Heavy chain CDR1
GYTFATYG

SEQ ID NO: 11053 - protein, 8 aa, Homo sapiens
  Heavy chain CDR1
GFSFSLYG

SEQ ID NO: 11054 - protein, 8 aa, Homo sapiens
  Heavy chain CDR1
GFTFSNYG

SEQ ID NO: 11055 - protein, 8 aa, Homo sapiens
  Heavy chain CDR1
GYTFATYG

SEQ ID NO: 11056 - protein, 8 aa, Homo sapiens
  Heavy chain CDR1
GYTFATYG

SEQ ID NO: 11057 - protein, 8 aa, Homo sapiens
  Heavy chain CDR1
GGSISSYY

SEQ ID NO: 11058 - protein, 8 aa, Homo sapiens
  Heavy chain CDR1
GFTFSNYG

SEQ ID NO: 11059 - protein, 10 aa, Homo sapiens
  Heavy chain CDR1
GGSISSSSYY

SEQ ID NO: 11060 - protein, 8 aa, Homo sapiens
  Heavy chain CDR1
GFTFSSYG

SEQ ID NO: 11061 - protein, 8 aa, Homo sapiens
  Heavy chain CDR1
GFTFSNYG

SEQ ID NO: 11062 - protein, 8 aa, Homo sapiens
  Heavy chain CDR1
GFTFSNYG

SEQ ID NO: 11063 - protein, 8 aa, Homo sapiens
  Heavy chain CDR1
GFTFSNYG

SEQ ID NO: 11064 - protein, 8 aa, Homo sapiens
  Heavy chain CDR1
GFTFSSYG

SEQ ID NO: 11065 - protein, 8 aa, Homo sapiens
  Heavy chain CDR1
GFTFSNYG

SEQ ID NO: 11066 - protein, 8 aa, Homo sapiens
  Heavy chain CDR1
GFTFSNYG

SEQ ID NO: 11067 - protein, 8 aa, Homo sapiens
  Heavy chain CDR1
GFTFSNYG

SEQ ID NO: 11068 - protein, 8 aa, Homo sapiens
  Heavy chain CDR1
GFTFSDYG

SEQ ID NO: 11069 - protein, 8 aa, Homo sapiens
  Heavy chain CDR1
GFTFSNYG

SEQ ID NO: 11070 - protein, 8 aa, Homo sapiens
  Heavy chain CDR1
GFTFSNYG

SEQ ID NO: 11071 - protein, 8 aa, Homo sapiens
  Heavy chain CDR1
GFTFSNYG

SEQ ID NO: 11072 - protein, 8 aa, Homo sapiens
  Heavy chain CDR1
GFTFSNYG

SEQ ID NO: 11073 - protein, 8 aa, Homo sapiens
  Heavy chain CDR1
GFTFSNYG

SEQ ID NO: 11074 - protein, 8 aa, Homo sapiens
  Heavy chain CDR1
GFTFSNYG

SEQ ID NO: 11075 - protein, 8 aa, Homo sapiens
  Heavy chain CDR1
GFTFSNYG

SEQ ID NO: 11076 - protein, 8 aa, Homo sapiens
  Heavy chain CDR1
GFTFSNYG

SEQ ID NO: 11077 - protein, 8 aa, Homo sapiens
  Heavy chain CDR1
GFTFSNYG

SEQ ID NO: 11078 - protein, 8 aa, Homo sapiens
  Heavy chain CDR1
GYTFATYG

SEQ ID NO: 11079 - protein, 8 aa, Homo sapiens
  Heavy chain CDR1
GYTFTNYG

SEQ ID NO: 11080 - protein, 10 aa, Homo sapiens
  Heavy chain CDR1
GGSISSSSYY

SEQ ID NO: 11081 - protein, 8 aa, Homo sapiens
  Heavy chain CDR1
GYTFATYG

SEQ ID NO: 11082 - protein, 8 aa, Homo sapiens
  Heavy chain CDR1
GFTFSSYA

SEQ ID NO: 11083 - protein, 8 aa, Homo sapiens
  Heavy chain CDR1
GGSISSYY

SEQ ID NO: 11084 - protein, 8 aa, Homo sapiens
  Heavy chain CDR1
GFTFRSYG

SEQ ID NO: 11085 - protein, 8 aa, Homo sapiens
  Heavy chain CDR1
GYTFTSYG

SEQ ID NO: 11086 - protein, 8 aa, Homo sapiens
  Heavy chain CDR1
GYTFATYG

SEQ ID NO: 11087 - protein, 8 aa, Homo sapiens
  Heavy chain CDR1
GFTFSSYG

SEQ ID NO: 11088 - protein, 8 aa, Homo sapiens
  Heavy chain CDR1
GFTFSSYG

SEQ ID NO: 11089 - protein, 8 aa, Homo sapiens
  Heavy chain CDR1
GFTFSSYG

SEQ ID NO: 11090 - protein, 8 aa, Homo sapiens
  Heavy chain CDR1
GFTFSSYG

SEQ ID NO: 11091 - protein, 8 aa, Homo sapiens
  Heavy chain CDR1
GFTFSSYG

SEQ ID NO: 11092 - protein, 8 aa, Homo sapiens
  Heavy chain CDR1
GFTFSSYG

SEQ ID NO: 11093 - protein, 8 aa, Homo sapiens
  Heavy chain CDR1
GFTFSSYG

SEQ ID NO: 11094 - protein, 8 aa, Homo sapiens
  Heavy chain CDR1
GFTFSSYG

SEQ ID NO: 11095 - protein, 8 aa, Homo sapiens
  Heavy chain CDR1
GFTFSSYG

SEQ ID NO: 11096 - protein, 8 aa, Homo sapiens
  Heavy chain CDR1
GFTFSSYG

SEQ ID NO: 11097 - protein, 8 aa, Homo sapiens
  Heavy chain CDR1
GYTFATYG

SEQ ID NO: 11098 - protein, 8 aa, Homo sapiens
  Heavy chain CDR1
GFTFSSYG

SEQ ID NO: 11099 - protein, 8 aa, Homo sapiens
  Heavy chain CDR1
GYTFATYG

SEQ ID NO: 11100 - protein, 8 aa, Homo sapiens
  Heavy chain CDR1
GFTFSSYG

SEQ ID NO: 11101 - protein, 8 aa, Homo sapiens
  Heavy chain CDR1
GYTFTSYG

SEQ ID NO: 11102 - protein, 8 aa, Homo sapiens
  Heavy chain CDR1
GYTFATYG

SEQ ID NO: 11103 - protein, 8 aa, Homo sapiens
  Heavy chain CDR1
GFTFSDYY

SEQ ID NO: 11104 - protein, 8 aa, Homo sapiens
  Heavy chain CDR1
GYTFATYG

SEQ ID NO: 11105 - protein, 8 aa, Homo sapiens
  Heavy chain CDR1
GFTFSNYG

SEQ ID NO: 11106 - protein, 8 aa, Homo sapiens
  Heavy chain CDR1
GFTFSNYG

SEQ ID NO: 11107 - protein, 8 aa, Homo sapiens
  Heavy chain CDR1
GYTFATYG

SEQ ID NO: 11108 - protein, 8 aa, Homo sapiens
  Heavy chain CDR1
GYTFTTYG

SEQ ID NO: 11109 - protein, 8 aa, Homo sapiens
  Heavy chain CDR1
GYTFAIYG

SEQ ID NO: 11110 - protein, 8 aa, Homo sapiens
  Heavy chain CDR1
GYTFATYG

SEQ ID NO: 11111 - protein, 8 aa, Homo sapiens
  Heavy chain CDR1
GYTFATYG

SEQ ID NO: 11112 - protein, 8 aa, Homo sapiens
  Heavy chain CDR1
GYTFATYG

SEQ ID NO: 11113 - protein, 8 aa, Homo sapiens
  Heavy chain CDR1
GYTFATYG

SEQ ID NO: 11114 - protein, 8 aa, Homo sapiens
  Heavy chain CDR1
GYTFATYG

SEQ ID NO: 11115 - protein, 8 aa, Homo sapiens
  Heavy chain CDR1
GYTFATYG

SEQ ID NO: 11116 - protein, 8 aa, Homo sapiens
  Heavy chain CDR1
GFTFHDYG

SEQ ID NO: 11117 - protein, 8 aa, Homo sapiens
  Heavy chain CDR1
GYTFATYG

SEQ ID NO: 11118 - protein, 8 aa, Homo sapiens
  Heavy chain CDR1
GFTFSSYA

SEQ ID NO: 11119 - protein, 8 aa, Homo sapiens
  Heavy chain CDR1
GYTFATYG

SEQ ID NO: 11120 - protein, 8 aa, Homo sapiens
  Heavy chain CDR1
GYTFATYG

SEQ ID NO: 11121 - protein, 8 aa, Homo sapiens
  Heavy chain CDR1
GYTFATYG

SEQ ID NO: 11122 - protein, 8 aa, Homo sapiens
  Heavy chain CDR1
GFTFSSYG

SEQ ID NO: 11123 - protein, 8 aa, Homo sapiens
  Heavy chain CDR1
GFTFSSYG

SEQ ID NO: 11124 - protein, 8 aa, Homo sapiens
  Heavy chain CDR1
GGSISSYY

SEQ ID NO: 11125 - protein, 8 aa, Homo sapiens
  Heavy chain CDR1
GYTFATYG

SEQ ID NO: 11126 - protein, 8 aa, Homo sapiens
  Heavy chain CDR1
GYTFATYG

SEQ ID NO: 11127 - protein, 8 aa, Homo sapiens
  Heavy chain CDR1
GYTFATYG

SEQ ID NO: 11128 - protein, 8 aa, Homo sapiens
  Heavy chain CDR1
GYTFATYG

SEQ ID NO: 11129 - protein, 8 aa, Homo sapiens
  Heavy chain CDR1
GYTFATYG

SEQ ID NO: 11130 - protein, 8 aa, Homo sapiens
  Heavy chain CDR1
GFTFRSYG

SEQ ID NO: 11131 - protein, 8 aa, Homo sapiens
  Heavy chain CDR1
GYTFAIYG

SEQ ID NO: 11132 - protein, 8 aa, Homo sapiens
  Heavy chain CDR1
GYTFATYG

SEQ ID NO: 11133 - protein, 8 aa, Homo sapiens
  Heavy chain CDR1
GYTFATYG

SEQ ID NO: 11134 - protein, 8 aa, Homo sapiens
  Heavy chain CDR1
GYTFATYG

SEQ ID NO: 11135 - protein, 8 aa, Homo sapiens
  Heavy chain CDR1
GYTFATYG

SEQ ID NO: 11136 - protein, 8 aa, Homo sapiens
  Heavy chain CDR1
GYTFATYG

SEQ ID NO: 11137 - protein, 8 aa, Homo sapiens
  Heavy chain CDR1
GFTFSSYG

SEQ ID NO: 11138 - protein, 7 aa, Homo sapiens
  Heavy chain CDR2
IFTSGST

SEQ ID NO: 11139 - protein, 7 aa, Homo sapiens
  Heavy chain CDR2
IFTSGST

SEQ ID NO: 11140 - protein, 7 aa, Homo sapiens
  Heavy chain CDR2
IFTSGST

SEQ ID NO: 11141 - protein, 7 aa, Homo sapiens
  Heavy chain CDR2
IFTSGST

SEQ ID NO: 11142 - protein, 7 aa, Homo sapiens
  Heavy chain CDR2
IFTSGST

SEQ ID NO: 11143 - protein, 7 aa, Homo sapiens
  Heavy chain CDR2
IFTSGST

SEQ ID NO: 11144 - protein, 7 aa, Homo sapiens
  Heavy chain CDR2
IFTSGST

SEQ ID NO: 11145 - protein, 7 aa, Homo sapiens
  Heavy chain CDR2
IFTSGST

SEQ ID NO: 11146 - protein, 7 aa, Homo sapiens
  Heavy chain CDR2
IFTSGST

SEQ ID NO: 11147 - protein, 7 aa, Homo sapiens
  Heavy chain CDR2
IFTSGST

SEQ ID NO: 11148 - protein, 7 aa, Homo sapiens
  Heavy chain CDR2
IFTSGST

SEQ ID NO: 11149 - protein, 7 aa, Homo sapiens
  Heavy chain CDR2
IFTSGST

SEQ ID NO: 11150 - protein, 7 aa, Homo sapiens
  Heavy chain CDR2
IFTSGST

SEQ ID NO: 11151 - protein, 8 aa, Homo sapiens
  Heavy chain CDR2
INPSGGST

SEQ ID NO: 11152 - protein, 7 aa, Homo sapiens
  Heavy chain CDR2
IFTSGST

SEQ ID NO: 11153 - protein, 7 aa, Homo sapiens
  Heavy chain CDR2
IFTSGST

SEQ ID NO: 11154 - protein, 7 aa, Homo sapiens
  Heavy chain CDR2
IFTSGST

SEQ ID NO: 11155 - protein, 7 aa, Homo sapiens
  Heavy chain CDR2
IFTSGST

SEQ ID NO: 11156 - protein, 7 aa, Homo sapiens
  Heavy chain CDR2
IFTSGST

SEQ ID NO: 11157 - protein, 7 aa, Homo sapiens
  Heavy chain CDR2
IFTSGST

SEQ ID NO: 11158 - protein, 7 aa, Homo sapiens
  Heavy chain CDR2
IFTSGST

SEQ ID NO: 11159 - protein, 7 aa, Homo sapiens
  Heavy chain CDR2
IFTSGST

SEQ ID NO: 11160 - protein, 7 aa, Homo sapiens
  Heavy chain CDR2
IFTSGST

SEQ ID NO: 11161 - protein, 7 aa, Homo sapiens
  Heavy chain CDR2
IFTSGST

SEQ ID NO: 11162 - protein, 7 aa, Homo sapiens
  Heavy chain CDR2
IFTSGST

SEQ ID NO: 11163 - protein, 7 aa, Homo sapiens
  Heavy chain CDR2
IFTSGST

SEQ ID NO: 11164 - protein, 7 aa, Homo sapiens
  Heavy chain CDR2
IFTSGST

SEQ ID NO: 11165 - protein, 7 aa, Homo sapiens
  Heavy chain CDR2
IFTSGST

SEQ ID NO: 11166 - protein, 8 aa, Homo sapiens
  Heavy chain CDR2
INPSGGST

SEQ ID NO: 11167 - protein, 8 aa, Homo sapiens
  Heavy chain CDR2
INPSGGST

SEQ ID NO: 11168 - protein, 7 aa, Homo sapiens
  Heavy chain CDR2
IFTSGST

SEQ ID NO: 11169 - protein, 7 aa, Homo sapiens
  Heavy chain CDR2
IFTSGST

SEQ ID NO: 11170 - protein, 7 aa, Homo sapiens
  Heavy chain CDR2
IFTSGST

SEQ ID NO: 11171 - protein, 7 aa, Homo sapiens
  Heavy chain CDR2
IFTSGST

SEQ ID NO: 11172 - protein, 7 aa, Homo sapiens
  Heavy chain CDR2
IFTSGST

SEQ ID NO: 11173 - protein, 7 aa, Homo sapiens
  Heavy chain CDR2
IFTSGST

SEQ ID NO: 11174 - protein, 7 aa, Homo sapiens
  Heavy chain CDR2
IFTSGST

SEQ ID NO: 11175 - protein, 7 aa, Homo sapiens
  Heavy chain CDR2
IFTSGST

SEQ ID NO: 11176 - protein, 8 aa, Homo sapiens
  Heavy chain CDR2
INPSGGST

SEQ ID NO: 11177 - protein, 7 aa, Homo sapiens
  Heavy chain CDR2
IFTSGST

SEQ ID NO: 11178 - protein, 7 aa, Homo sapiens
  Heavy chain CDR2
IFTSGST

SEQ ID NO: 11179 - protein, 7 aa, Homo sapiens
  Heavy chain CDR2
IFTSGST

SEQ ID NO: 11180 - protein, 7 aa, Homo sapiens
  Heavy chain CDR2
IFTSGST

SEQ ID NO: 11181 - protein, 7 aa, Homo sapiens
  Heavy chain CDR2
IFTSGST

SEQ ID NO: 11182 - protein, 7 aa, Homo sapiens
  Heavy chain CDR2
IFTSGST

SEQ ID NO: 11183 - protein, 7 aa, Homo sapiens
  Heavy chain CDR2
IFTSGST

SEQ ID NO: 11184 - protein, 7 aa, Homo sapiens
  Heavy chain CDR2
IFTSGST

SEQ ID NO: 11185 - protein, 7 aa, Homo sapiens
  Heavy chain CDR2
IFTSGST

SEQ ID NO: 11186 - protein, 7 aa, Homo sapiens
  Heavy chain CDR2
IFTSGST

SEQ ID NO: 11187 - protein, 7 aa, Homo sapiens
  Heavy chain CDR2
IFTSGST

SEQ ID NO: 11188 - protein, 7 aa, Homo sapiens
  Heavy chain CDR2
IFTSGST

SEQ ID NO: 11189 - protein, 7 aa, Homo sapiens
  Heavy chain CDR2
IFTSGST

SEQ ID NO: 11190 - protein, 7 aa, Homo sapiens
  Heavy chain CDR2
IFTSGST

SEQ ID NO: 11191 - protein, 7 aa, Homo sapiens
  Heavy chain CDR2
IFTSGST

SEQ ID NO: 11192 - protein, 7 aa, Homo sapiens
  Heavy chain CDR2
IFTSGST

SEQ ID NO: 11193 - protein, 8 aa, Homo sapiens
  Heavy chain CDR2
FDPEDDEA

SEQ ID NO: 11194 - protein, 7 aa, Homo sapiens
  Heavy chain CDR2
IFTSGST

SEQ ID NO: 11195 - protein, 7 aa, Homo sapiens
  Heavy chain CDR2
IFTSGST

SEQ ID NO: 11196 - protein, 7 aa, Homo sapiens
  Heavy chain CDR2
IFTSGST

SEQ ID NO: 11197 - protein, 7 aa, Homo sapiens
  Heavy chain CDR2
IFTSGST

SEQ ID NO: 11198 - protein, 7 aa, Homo sapiens
  Heavy chain CDR2
IFTSGST

SEQ ID NO: 11199 - protein, 7 aa, Homo sapiens
  Heavy chain CDR2
IFTSGST

SEQ ID NO: 11200 - protein, 7 aa, Homo sapiens
  Heavy chain CDR2
IFTSGST

SEQ ID NO: 11201 - protein, 7 aa, Homo sapiens
  Heavy chain CDR2
IFTSGST

SEQ ID NO: 11202 - protein, 8 aa, Homo sapiens
  Heavy chain CDR2
IWYDGSNK

SEQ ID NO: 11203 - protein, 8 aa, Homo sapiens
  Heavy chain CDR2
INPSGGST

SEQ ID NO: 11204 - protein, 8 aa, Homo sapiens
  Heavy chain CDR2
INPSGGST

SEQ ID NO: 11205 - protein, 7 aa, Homo sapiens
  Heavy chain CDR2
IYTNGRT

SEQ ID NO: 11206 - protein, 10 aa, Homo sapiens
  Heavy chain CDR2
IRSKAYGGTT

SEQ ID NO: 11207 - protein, 7 aa, Homo sapiens
  Heavy chain CDR2
IYTNGRT

SEQ ID NO: 11208 - protein, 8 aa, Homo sapiens
  Heavy chain CDR2
IWYDGSNK

SEQ ID NO: 11209 - protein, 8 aa, Homo sapiens
  Heavy chain CDR2
IWYDGSNK

SEQ ID NO: 11210 - protein, 8 aa, Homo sapiens
  Heavy chain CDR2
IWYDGSNK

SEQ ID NO: 11211 - protein, 8 aa, Homo sapiens
  Heavy chain CDR2
IWYDGSNK

SEQ ID NO: 11212 - protein, 8 aa, Homo sapiens
  Heavy chain CDR2
IWYDGSNK

SEQ ID NO: 11213 - protein, 8 aa, Homo sapiens
  Heavy chain CDR2
IWYDGSNK

SEQ ID NO: 11214 - protein, 8 aa, Homo sapiens
  Heavy chain CDR2
FDPEDGET

SEQ ID NO: 11215 - protein, 8 aa, Homo sapiens
  Heavy chain CDR2
IWYDGSNK

SEQ ID NO: 11216 - protein, 8 aa, Homo sapiens
  Heavy chain CDR2
IWYDGSNK

SEQ ID NO: 11217 - protein, 8 aa, Homo sapiens
  Heavy chain CDR2
INPSGGST

SEQ ID NO: 11218 - protein, 8 aa, Homo sapiens
  Heavy chain CDR2
ISAYNGNT

SEQ ID NO: 11219 - protein, 8 aa, Homo sapiens
  Heavy chain CDR2
INPSGGST

SEQ ID NO: 11220 - protein, 8 aa, Homo sapiens
  Heavy chain CDR2
INPSGGST

SEQ ID NO: 11221 - protein, 8 aa, Homo sapiens
  Heavy chain CDR2
INPSGGST

SEQ ID NO: 11222 - protein, 8 aa, Homo sapiens
  Heavy chain CDR2
INPSGGST

SEQ ID NO: 11223 - protein, 8 aa, Homo sapiens
  Heavy chain CDR2
INPSGGST

SEQ ID NO: 11224 - protein, 8 aa, Homo sapiens
  Heavy chain CDR2
INPSGGST

SEQ ID NO: 11225 - protein, 8 aa, Homo sapiens
  Heavy chain CDR2
ISGSGGST

SEQ ID NO: 11226 - protein, 8 aa, Homo sapiens
  Heavy chain CDR2
INPSGGST

SEQ ID NO: 11227 - protein, 8 aa, Homo sapiens
  Heavy chain CDR2
ISAYNGNT

SEQ ID NO: 11228 - protein, 8 aa, Homo sapiens
  Heavy chain CDR2
ISGSGGST

SEQ ID NO: 11229 - protein, 8 aa, Homo sapiens
  Heavy chain CDR2
INPSGGST

SEQ ID NO: 11230 - protein, 8 aa, Homo sapiens
  Heavy chain CDR2
INPSGGST

SEQ ID NO: 11231 - protein, 8 aa, Homo sapiens
  Heavy chain CDR2
INPSGGST

SEQ ID NO: 11232 - protein, 10 aa, Homo sapiens
  Heavy chain CDR2
IRSKAFGGTT

SEQ ID NO: 11233 - protein, 8 aa, Homo sapiens
  Heavy chain CDR2
INPSGGST

SEQ ID NO: 11234 - protein, 8 aa, Homo sapiens
  Heavy chain CDR2
INPSGGST

SEQ ID NO: 11235 - protein, 8 aa, Homo sapiens
  Heavy chain CDR2
INPSGGST

SEQ ID NO: 11236 - protein, 8 aa, Homo sapiens
  Heavy chain CDR2
INPSGGST

SEQ ID NO: 11237 - protein, 8 aa, Homo sapiens
  Heavy chain CDR2
INPSGGST

SEQ ID NO: 11238 - protein, 8 aa, Homo sapiens
  Heavy chain CDR2
INPSGGST

SEQ ID NO: 11239 - protein, 8 aa, Homo sapiens
  Heavy chain CDR2
INPSGGST

SEQ ID NO: 11240 - protein, 8 aa, Homo sapiens
  Heavy chain CDR2
ISGSGGST

SEQ ID NO: 11241 - protein, 8 aa, Homo sapiens
  Heavy chain CDR2
ISAYNGNT

SEQ ID NO: 11242 - protein, 8 aa, Homo sapiens
  Heavy chain CDR2
IWYDGSNK

SEQ ID NO: 11243 - protein, 9 aa, Homo sapiens
  Heavy chain CDR2
TYYRSKWYI

SEQ ID NO: 11244 - protein, 8 aa, Homo sapiens
  Heavy chain CDR2
IWYDGSNK

SEQ ID NO: 11245 - protein, 9 aa, Homo sapiens
  Heavy chain CDR2
TYYRSKWYI

SEQ ID NO: 11246 - protein, 8 aa, Homo sapiens
  Heavy chain CDR2
IWYDGSNK

SEQ ID NO: 11247 - protein, 9 aa, Homo sapiens
  Heavy chain CDR2
TYYRSKWYI

SEQ ID NO: 11248 - protein, 8 aa, Homo sapiens
  Heavy chain CDR2
IWYDGSNK

SEQ ID NO: 11249 - protein, 9 aa, Homo sapiens
  Heavy chain CDR2
TYYRSKWYI

SEQ ID NO: 11250 - protein, 9 aa, Homo sapiens
  Heavy chain CDR2
TYYRSKWYI

SEQ ID NO: 11251 - protein, 8 aa, Homo sapiens
  Heavy chain CDR2
IWYDGSNK

SEQ ID NO: 11252 - protein, 9 aa, Homo sapiens
  Heavy chain CDR2
TYYRSKWYI

SEQ ID NO: 11253 - protein, 8 aa, Homo sapiens
  Heavy chain CDR2
IWYDGSNK

SEQ ID NO: 11254 - protein, 8 aa, Homo sapiens
  Heavy chain CDR2
IWYDGSKK

SEQ ID NO: 11255 - protein, 7 aa, Homo sapiens
  Heavy chain CDR2
TYYSGNT

SEQ ID NO: 11256 - protein, 7 aa, Homo sapiens
  Heavy chain CDR2
IYYSGNT

SEQ ID NO: 11257 - protein, 8 aa, Homo sapiens
  Heavy chain CDR2
IWYDGSIK

SEQ ID NO: 11258 - protein, 8 aa, Homo sapiens
  Heavy chain CDR2
IWYDGSIQ

SEQ ID NO: 11259 - protein, 8 aa, Homo sapiens
  Heavy chain CDR2
INNSGDIT

SEQ ID NO: 11260 - protein, 8 aa, Homo sapiens
  Heavy chain CDR2
IWYDGSKK

SEQ ID NO: 11261 - protein, 8 aa, Homo sapiens
  Heavy chain CDR2
VWYDGSNK

SEQ ID NO: 11262 - protein, 7 aa, Homo sapiens
  Heavy chain CDR2
TYYSGNT

SEQ ID NO: 11263 - protein, 8 aa, Homo sapiens
  Heavy chain CDR2
IWYDGSKK

SEQ ID NO: 11264 - protein, 8 aa, Homo sapiens
  Heavy chain CDR2
IWYDGSKK

SEQ ID NO: 11265 - protein, 9 aa, Homo sapiens
  Heavy chain CDR2
TFYRSKWYT

SEQ ID NO: 11266 - protein, 8 aa, Homo sapiens
  Heavy chain CDR2
IWYDGSKK

SEQ ID NO: 11267 - protein, 8 aa, Homo sapiens
  Heavy chain CDR2
IWYDGSKK

SEQ ID NO: 11268 - protein, 8 aa, Homo sapiens
  Heavy chain CDR2
IWYDGSKK

SEQ ID NO: 11269 - protein, 8 aa, Homo sapiens
  Heavy chain CDR2
IWYDGSKK

SEQ ID NO: 11270 - protein, 8 aa, Homo sapiens
  Heavy chain CDR2
IWYDGSIK

SEQ ID NO: 11271 - protein, 8 aa, Homo sapiens
  Heavy chain CDR2
IWYDGSKK

SEQ ID NO: 11272 - protein, 8 aa, Homo sapiens
  Heavy chain CDR2
IWYDGSKK

SEQ ID NO: 11273 - protein, 8 aa, Homo sapiens
  Heavy chain CDR2
IWYDGSKK

SEQ ID NO: 11274 - protein, 8 aa, Homo sapiens
  Heavy chain CDR2
ISAYNGNT

SEQ ID NO: 11275 - protein, 8 aa, Homo sapiens
  Heavy chain CDR2
ISAYNGNT

SEQ ID NO: 11276 - protein, 8 aa, Homo sapiens
  Heavy chain CDR2
INWNGGST

SEQ ID NO: 11277 - protein, 8 aa, Homo sapiens
  Heavy chain CDR2
INWNGGST

SEQ ID NO: 11278 - protein, 7 aa, Homo sapiens
  Heavy chain CDR2
IYYSGST

SEQ ID NO: 11279 - protein, 8 aa, Homo sapiens
  Heavy chain CDR2
ISAYNGNT

SEQ ID NO: 11280 - protein, 8 aa, Homo sapiens
  Heavy chain CDR2
ISAYNGNT

SEQ ID NO: 11281 - protein, 8 aa, Homo sapiens
  Heavy chain CDR2
ISAYNGNT

SEQ ID NO: 11282 - protein, 8 aa, Homo sapiens
  Heavy chain CDR2
INWNGGST

SEQ ID NO: 11283 - protein, 8 aa, Homo sapiens
  Heavy chain CDR2
ISAYNGNT

SEQ ID NO: 11284 - protein, 8 aa, Homo sapiens
  Heavy chain CDR2
ISAYNGNT

SEQ ID NO: 11285 - protein, 8 aa, Homo sapiens
  Heavy chain CDR2
ISAYNGNT

SEQ ID NO: 11286 - protein, 8 aa, Homo sapiens
  Heavy chain CDR2
ISAYNGNT

SEQ ID NO: 11287 - protein, 8 aa, Homo sapiens
  Heavy chain CDR2
ISAYNGNT

SEQ ID NO: 11288 - protein, 8 aa, Homo sapiens
  Heavy chain CDR2
ISAYNGNT

SEQ ID NO: 11289 - protein, 8 aa, Homo sapiens
  Heavy chain CDR2
INWNGGST

SEQ ID NO: 11290 - protein, 8 aa, Homo sapiens
  Heavy chain CDR2
ISAYNGNT

SEQ ID NO: 11291 - protein, 8 aa, Homo sapiens
  Heavy chain CDR2
ISAYNGNT

SEQ ID NO: 11292 - protein, 8 aa, Homo sapiens
  Heavy chain CDR2
ISAYNGNT

SEQ ID NO: 11293 - protein, 8 aa, Homo sapiens
  Heavy chain CDR2
ISAYNGNT

SEQ ID NO: 11294 - protein, 8 aa, Homo sapiens
  Heavy chain CDR2
ISAYNGNT

SEQ ID NO: 11295 - protein, 8 aa, Homo sapiens
  Heavy chain CDR2
ISAYNGNT

SEQ ID NO: 11296 - protein, 8 aa, Homo sapiens
  Heavy chain CDR2
ISAYNGNT

SEQ ID NO: 11297 - protein, 8 aa, Homo sapiens
  Heavy chain CDR2
ISAYNGNT

SEQ ID NO: 11298 - protein, 8 aa, Homo sapiens
  Heavy chain CDR2
ISAYNGNT

SEQ ID NO: 11299 - protein, 8 aa, Homo sapiens
  Heavy chain CDR2
INWNGGST

SEQ ID NO: 11300 - protein, 8 aa, Homo sapiens
  Heavy chain CDR2
INWNGGST

SEQ ID NO: 11301 - protein, 8 aa, Homo sapiens
  Heavy chain CDR2
INWNGGST

SEQ ID NO: 11302 - protein, 8 aa, Homo sapiens
  Heavy chain CDR2
ISAYNGNT

SEQ ID NO: 11303 - protein, 8 aa, Homo sapiens
  Heavy chain CDR2
IWYDGSNQ

SEQ ID NO: 11304 - protein, 8 aa, Homo sapiens
  Heavy chain CDR2
ISAYNGNT

SEQ ID NO: 11305 - protein, 8 aa, Homo sapiens
  Heavy chain CDR2
IWYDGSNK

SEQ ID NO: 11306 - protein, 7 aa, Homo sapiens
  Heavy chain CDR2
IGTAGDT

SEQ ID NO: 11307 - protein, 8 aa, Homo sapiens
  Heavy chain CDR2
IWYDGSNK

SEQ ID NO: 11308 - protein, 8 aa, Homo sapiens
  Heavy chain CDR2
INPSGSST

SEQ ID NO: 11309 - protein, 8 aa, Homo sapiens
  Heavy chain CDR2
IWFDGSNK

SEQ ID NO: 11310 - protein, 8 aa, Homo sapiens
  Heavy chain CDR2
IWYDGSNK

SEQ ID NO: 11311 - protein, 8 aa, Homo sapiens
  Heavy chain CDR2
IWYDGSNK

SEQ ID NO: 11312 - protein, 8 aa, Homo sapiens
  Heavy chain CDR2
IWYDGSNK

SEQ ID NO: 11313 - protein, 8 aa, Homo sapiens
  Heavy chain CDR2
ISAYNGNT

SEQ ID NO: 11314 - protein, 8 aa, Homo sapiens
  Heavy chain CDR2
IWYDGSNK

SEQ ID NO: 11315 - protein, 8 aa, Homo sapiens
  Heavy chain CDR2
ISAYNGNT

SEQ ID NO: 11316 - protein, 8 aa, Homo sapiens
  Heavy chain CDR2
IWYDGSNK

SEQ ID NO: 11317 - protein, 8 aa, Homo sapiens
  Heavy chain CDR2
IWYDGSNK

SEQ ID NO: 11318 - protein, 8 aa, Homo sapiens
  Heavy chain CDR2
INPSGGST

SEQ ID NO: 11319 - protein, 8 aa, Homo sapiens
  Heavy chain CDR2
IWYDGSIK

SEQ ID NO: 11320 - protein, 8 aa, Homo sapiens
  Heavy chain CDR2
IWYDGSNK

SEQ ID NO: 11321 - protein, 8 aa, Homo sapiens
  Heavy chain CDR2
IWYDGSNK

SEQ ID NO: 11322 - protein, 8 aa, Homo sapiens
  Heavy chain CDR2
IWYDGSNK

SEQ ID NO: 11323 - protein, 8 aa, Homo sapiens
  Heavy chain CDR2
IWYDGSNK

SEQ ID NO: 11324 - protein, 8 aa, Homo sapiens
  Heavy chain CDR2
IWYDGSNQ

SEQ ID NO: 11325 - protein, 8 aa, Homo sapiens
  Heavy chain CDR2
IWYDGSNK

SEQ ID NO: 11326 - protein, 8 aa, Homo sapiens
  Heavy chain CDR2
ISAYNGNT

SEQ ID NO: 11327 - protein, 8 aa, Homo sapiens
  Heavy chain CDR2
IWFDGSNK

SEQ ID NO: 11328 - protein, 8 aa, Homo sapiens
  Heavy chain CDR2
IWYDGSNK

SEQ ID NO: 11329 - protein, 8 aa, Homo sapiens
  Heavy chain CDR2
ISAYNGNT

SEQ ID NO: 11330 - protein, 8 aa, Homo sapiens
  Heavy chain CDR2
IWYDGSNK

SEQ ID NO: 11331 - protein, 8 aa, Homo sapiens
  Heavy chain CDR2
IWYDGSNK

SEQ ID NO: 11332 - protein, 7 aa, Homo sapiens
  Heavy chain CDR2
IYYSGST

SEQ ID NO: 11333 - protein, 8 aa, Homo sapiens
  Heavy chain CDR2
IWFDGINK

SEQ ID NO: 11334 - protein, 8 aa, Homo sapiens
  Heavy chain CDR2
IWYDGSNK

SEQ ID NO: 11335 - protein, 8 aa, Homo sapiens
  Heavy chain CDR2
IWYDGSNK

SEQ ID NO: 11336 - protein, 8 aa, Homo sapiens
  Heavy chain CDR2
IWYDGSNK

SEQ ID NO: 11337 - protein, 8 aa, Homo sapiens
  Heavy chain CDR2
ISAYNGNT

SEQ ID NO: 11338 - protein, 7 aa, Homo sapiens
  Heavy chain CDR2
IDTAGDT

SEQ ID NO: 11339 - protein, 8 aa, Homo sapiens
  Heavy chain CDR2
IWYDGSNQ

SEQ ID NO: 11340 - protein, 8 aa, Homo sapiens
  Heavy chain CDR2
IWYDGSNQ

SEQ ID NO: 11341 - protein, 8 aa, Homo sapiens
  Heavy chain CDR2
IWYDGSNQ

SEQ ID NO: 11342 - protein, 8 aa, Homo sapiens
  Heavy chain CDR2
IWYDGSNK

SEQ ID NO: 11343 - protein, 8 aa, Homo sapiens
  Heavy chain CDR2
IWYDGSNK

SEQ ID NO: 11344 - protein, 8 aa, Homo sapiens
  Heavy chain CDR2
ISAYNGNT

SEQ ID NO: 11345 - protein, 8 aa, Homo sapiens
  Heavy chain CDR2
FDPEDGET

SEQ ID NO: 11346 - protein, 8 aa, Homo sapiens
  Heavy chain CDR2
IWYDGSNK

SEQ ID NO: 11347 - protein, 7 aa, Homo sapiens
  Heavy chain CDR2
IGTAGDT

SEQ ID NO: 11348 - protein, 8 aa, Homo sapiens
  Heavy chain CDR2
IWYDGSNQ

SEQ ID NO: 11349 - protein, 8 aa, Homo sapiens
  Heavy chain CDR2
ISAYNGNT

SEQ ID NO: 11350 - protein, 8 aa, Homo sapiens
  Heavy chain CDR2
IWYDGSNQ

SEQ ID NO: 11351 - protein, 8 aa, Homo sapiens
  Heavy chain CDR2
IWYDGSNQ

SEQ ID NO: 11352 - protein, 7 aa, Homo sapiens
  Heavy chain CDR2
IGTAGDT

SEQ ID NO: 11353 - protein, 8 aa, Homo sapiens
  Heavy chain CDR2
IWYDGSNK

SEQ ID NO: 11354 - protein, 8 aa, Homo sapiens
  Heavy chain CDR2
IWYDGGNK

SEQ ID NO: 11355 - protein, 7 aa, Homo sapiens
  Heavy chain CDR2
IYYSGST

SEQ ID NO: 11356 - protein, 8 aa, Homo sapiens
  Heavy chain CDR2
IWYDGSNK

SEQ ID NO: 11357 - protein, 7 aa, Homo sapiens
  Heavy chain CDR2
IFTRGNT

SEQ ID NO: 11358 - protein, 8 aa, Homo sapiens
  Heavy chain CDR2
IWYDGSNK

SEQ ID NO: 11359 - protein, 8 aa, Homo sapiens
  Heavy chain CDR2
IWYDGSNK

SEQ ID NO: 11360 - protein, 8 aa, Homo sapiens
  Heavy chain CDR2
IWYDGSNK

SEQ ID NO: 11361 - protein, 8 aa, Homo sapiens
  Heavy chain CDR2
IWYDGGNK

SEQ ID NO: 11362 - protein, 8 aa, Homo sapiens
  Heavy chain CDR2
IWYDGSNQ

SEQ ID NO: 11363 - protein, 7 aa, Homo sapiens
  Heavy chain CDR2
INHSGST

SEQ ID NO: 11364 - protein, 8 aa, Homo sapiens
  Heavy chain CDR2
IWYDGSNK

SEQ ID NO: 11365 - protein, 7 aa, Homo sapiens
  Heavy chain CDR2
IFTRGNT

SEQ ID NO: 11366 - protein, 8 aa, Homo sapiens
  Heavy chain CDR2
IWYDGGNK

SEQ ID NO: 11367 - protein, 8 aa, Homo sapiens
  Heavy chain CDR2
IWYDGGNK

SEQ ID NO: 11368 - protein, 8 aa, Homo sapiens
  Heavy chain CDR2
IWYDGSNK

SEQ ID NO: 11369 - protein, 8 aa, Homo sapiens
  Heavy chain CDR2
IWYDGSNK

SEQ ID NO: 11370 - protein, 8 aa, Homo sapiens
  Heavy chain CDR2
IWYDGSNK

SEQ ID NO: 11371 - protein, 7 aa, Homo sapiens
  Heavy chain CDR2
IFTRGNT

SEQ ID NO: 11372 - protein, 8 aa, Homo sapiens
  Heavy chain CDR2
IWYDGSNK

SEQ ID NO: 11373 - protein, 8 aa, Homo sapiens
  Heavy chain CDR2
IWYDGGNK

SEQ ID NO: 11374 - protein, 7 aa, Homo sapiens
  Heavy chain CDR2
IYYSGST

SEQ ID NO: 11375 - protein, 8 aa, Homo sapiens
  Heavy chain CDR2
ISSSGSTI

SEQ ID NO: 11376 - protein, 8 aa, Homo sapiens
  Heavy chain CDR2
IWYDGGNK

SEQ ID NO: 11377 - protein, 7 aa, Homo sapiens
  Heavy chain CDR2
IFTRGNT

SEQ ID NO: 11378 - protein, 8 aa, Homo sapiens
  Heavy chain CDR2
IWYDGSNK

SEQ ID NO: 11379 - protein, 7 aa, Homo sapiens
  Heavy chain CDR2
IFTRGNT

SEQ ID NO: 11380 - protein, 9 aa, Homo sapiens
  Heavy chain CDR2
TYYRSKWYN

SEQ ID NO: 11381 - protein, 7 aa, Homo sapiens
  Heavy chain CDR2
IFTRGNT

SEQ ID NO: 11382 - protein, 7 aa, Homo sapiens
  Heavy chain CDR2
IFTRGNT

SEQ ID NO: 11383 - protein, 7 aa, Homo sapiens
  Heavy chain CDR2
IFTRGNT

SEQ ID NO: 11384 - protein, 8 aa, Homo sapiens
  Heavy chain CDR2
IWYDGSNK

SEQ ID NO: 11385 - protein, 8 aa, Homo sapiens
  Heavy chain CDR2
IWYDGGNK

SEQ ID NO: 11386 - protein, 8 aa, Homo sapiens
  Heavy chain CDR2
IWYDGSNQ

SEQ ID NO: 11387 - protein, 7 aa, Homo sapiens
  Heavy chain CDR2
IYYSGST

SEQ ID NO: 11388 - protein, 7 aa, Homo sapiens
  Heavy chain CDR2
IFTRGNT

SEQ ID NO: 11389 - protein, 8 aa, Homo sapiens
  Heavy chain CDR2
IWYDGSNK

SEQ ID NO: 11390 - protein, 7 aa, Homo sapiens
  Heavy chain CDR2
IFTRGNT

SEQ ID NO: 11391 - protein, 8 aa, Homo sapiens
  Heavy chain CDR2
IWYDGGNK

SEQ ID NO: 11392 - protein, 8 aa, Homo sapiens
  Heavy chain CDR2
IWYDGGNK

SEQ ID NO: 11393 - protein, 7 aa, Homo sapiens
  Heavy chain CDR2
IFTRGNT

SEQ ID NO: 11394 - protein, 8 aa, Homo sapiens
  Heavy chain CDR2
ISAYNGNR

SEQ ID NO: 11395 - protein, 8 aa, Homo sapiens
  Heavy chain CDR2
IWYDGSNK

SEQ ID NO: 11396 - protein, 8 aa, Homo sapiens
  Heavy chain CDR2
IWYDGSNK

SEQ ID NO: 11397 - protein, 8 aa, Homo sapiens
  Heavy chain CDR2
ISAYSGNT

SEQ ID NO: 11398 - protein, 8 aa, Homo sapiens
  Heavy chain CDR2
ISAHNGNT

SEQ ID NO: 11399 - protein, 8 aa, Homo sapiens
  Heavy chain CDR2
IWYDGSNK

SEQ ID NO: 11400 - protein, 8 aa, Homo sapiens
  Heavy chain CDR2
ISGSGGST

SEQ ID NO: 11401 - protein, 8 aa, Homo sapiens
  Heavy chain CDR2
ISAYSVNT

SEQ ID NO: 11402 - protein, 7 aa, Homo sapiens
  Heavy chain CDR2
IYYSGST

SEQ ID NO: 11403 - protein, 7 aa, Homo sapiens
  Heavy chain CDR2
IYYSGST

SEQ ID NO: 11404 - protein, 8 aa, Homo sapiens
  Heavy chain CDR2
ISAYNGNR

SEQ ID NO: 11405 - protein, 8 aa, Homo sapiens
  Heavy chain CDR2
ISAYNGNR

SEQ ID NO: 11406 - protein, 8 aa, Homo sapiens
  Heavy chain CDR2
ISAYSDNT

SEQ ID NO: 11407 - protein, 8 aa, Homo sapiens
  Heavy chain CDR2
ISAYNGNR

SEQ ID NO: 11408 - protein, 8 aa, Homo sapiens
  Heavy chain CDR2
ISAYSDNT

SEQ ID NO: 11409 - protein, 8 aa, Homo sapiens
  Heavy chain CDR2
ISAHNGNT

SEQ ID NO: 11410 - protein, 8 aa, Homo sapiens
  Heavy chain CDR2
ISAYNGNR

SEQ ID NO: 11411 - protein, 8 aa, Homo sapiens
  Heavy chain CDR2
ISAYNGNR

SEQ ID NO: 11412 - protein, 8 aa, Homo sapiens
  Heavy chain CDR2
ISAYNGNR

SEQ ID NO: 11413 - protein, 8 aa, Homo sapiens
  Heavy chain CDR2
ISAYNGNR

SEQ ID NO: 11414 - protein, 8 aa, Homo sapiens
  Heavy chain CDR2
ISAYNGNR

SEQ ID NO: 11415 - protein, 8 aa, Homo sapiens
  Heavy chain CDR2
ISAYNGNR

SEQ ID NO: 11416 - protein, 8 aa, Homo sapiens
  Heavy chain CDR2
ISAYNGNR

SEQ ID NO: 11417 - protein, 8 aa, Homo sapiens
  Heavy chain CDR2
IWYDGSNK

SEQ ID NO: 11418 - protein, 8 aa, Homo sapiens
  Heavy chain CDR2
ISAHNGNT

SEQ ID NO: 11419 - protein, 8 aa, Homo sapiens
  Heavy chain CDR2
ISAYNGNT

SEQ ID NO: 11420 - protein, 8 aa, Homo sapiens
  Heavy chain CDR2
ISAYNGNR

SEQ ID NO: 11421 - protein, 8 aa, Homo sapiens
  Heavy chain CDR2
IWYDGSNK

SEQ ID NO: 11422 - protein, 8 aa, Homo sapiens
  Heavy chain CDR2
ISAYNGNR

SEQ ID NO: 11423 - protein, 8 aa, Homo sapiens
  Heavy chain CDR2
ISAYNGNR

SEQ ID NO: 11424 - protein, 8 aa, Homo sapiens
  Heavy chain CDR2
IWYDGSNK

SEQ ID NO: 11425 - protein, 8 aa, Homo sapiens
  Heavy chain CDR2
ISAYNVNT

SEQ ID NO: 11426 - protein, 7 aa, Homo sapiens
  Heavy chain CDR2
IYTSGRT

SEQ ID NO: 11427 - protein, 8 aa, Homo sapiens
  Heavy chain CDR2
ISAYNGNT

SEQ ID NO: 11428 - protein, 8 aa, Homo sapiens
  Heavy chain CDR2
ISAYNGNT

SEQ ID NO: 11429 - protein, 7 aa, Homo sapiens
  Heavy chain CDR2
IYTSGST

SEQ ID NO: 11430 - protein, 8 aa, Homo sapiens
  Heavy chain CDR2
ISAYNVNT

SEQ ID NO: 11431 - protein, 7 aa, Homo sapiens
  Heavy chain CDR2
IYTSGRT

SEQ ID NO: 11432 - protein, 7 aa, Homo sapiens
  Heavy chain CDR2
IYTSGRT

SEQ ID NO: 11433 - protein, 8 aa, Homo sapiens
  Heavy chain CDR2
ISAYNGNT

SEQ ID NO: 11434 - protein, 8 aa, Homo sapiens
  Heavy chain CDR2
INPSGGST

SEQ ID NO: 11435 - protein, 7 aa, Homo sapiens
  Heavy chain CDR2
IYTSGRT

SEQ ID NO: 11436 - protein, 8 aa, Homo sapiens
  Heavy chain CDR2
ISYDGSNK

SEQ ID NO: 11437 - protein, 8 aa, Homo sapiens
  Heavy chain CDR2
ISAYNGNT

SEQ ID NO: 11438 - protein, 7 aa, Homo sapiens
  Heavy chain CDR2
IYTSGRT

SEQ ID NO: 11439 - protein, 8 aa, Homo sapiens
  Heavy chain CDR2
ISAYNGNT

SEQ ID NO: 11440 - protein, 8 aa, Homo sapiens
  Heavy chain CDR2
ISAYNGNT

SEQ ID NO: 11441 - protein, 7 aa, Homo sapiens
  Heavy chain CDR2
IYTSGRT

SEQ ID NO: 11442 - protein, 8 aa, Homo sapiens
  Heavy chain CDR2
ISGSGGNT

SEQ ID NO: 11443 - protein, 8 aa, Homo sapiens
  Heavy chain CDR2
ISAYNGNT

SEQ ID NO: 11444 - protein, 7 aa, Homo sapiens
  Heavy chain CDR2
IYTSGRT

SEQ ID NO: 11445 - protein, 8 aa, Homo sapiens
  Heavy chain CDR2
ISAYNGNT

SEQ ID NO: 11446 - protein, 8 aa, Homo sapiens
  Heavy chain CDR2
ISAYNGNT

SEQ ID NO: 11447 - protein, 8 aa, Homo sapiens
  Heavy chain CDR2
ISAYNGNT

SEQ ID NO: 11448 - protein, 8 aa, Homo sapiens
  Heavy chain CDR2
ISAYNGNT

SEQ ID NO: 11449 - protein, 8 aa, Homo sapiens
  Heavy chain CDR2
IWYDGSNK

SEQ ID NO: 11450 - protein, 7 aa, Homo sapiens
  Heavy chain CDR2
IYTSGRT

SEQ ID NO: 11451 - protein, 8 aa, Homo sapiens
  Heavy chain CDR2
IWYDGSNK

SEQ ID NO: 11452 - protein, 8 aa, Homo sapiens
  Heavy chain CDR2
IWYDGSNK

SEQ ID NO: 11453 - protein, 8 aa, Homo sapiens
  Heavy chain CDR2
ISYDGSNK

SEQ ID NO: 11454 - protein, 8 aa, Homo sapiens
  Heavy chain CDR2
IWYDGSNK

SEQ ID NO: 11455 - protein, 8 aa, Homo sapiens
  Heavy chain CDR2
IWYDGSNK

SEQ ID NO: 11456 - protein, 8 aa, Homo sapiens
  Heavy chain CDR2
IWYDGSNK

SEQ ID NO: 11457 - protein, 8 aa, Homo sapiens
  Heavy chain CDR2
IWYDGSNK

SEQ ID NO: 11458 - protein, 8 aa, Homo sapiens
  Heavy chain CDR2
IWYDGSNK

SEQ ID NO: 11459 - protein, 8 aa, Homo sapiens
  Heavy chain CDR2
IWYDGSIK

SEQ ID NO: 11460 - protein, 10 aa, Homo sapiens
  Heavy chain CDR2
IKSKSDGGTT

SEQ ID NO: 11461 - protein, 8 aa, Homo sapiens
  Heavy chain CDR2
ISGSGGST

SEQ ID NO: 11462 - protein, 8 aa, Homo sapiens
  Heavy chain CDR2
ISAYNGNT

SEQ ID NO: 11463 - protein, 8 aa, Homo sapiens
  Heavy chain CDR2
ISGSGGST

SEQ ID NO: 11464 - protein, 8 aa, Homo sapiens
  Heavy chain CDR2
ISGGGYTI

SEQ ID NO: 11465 - protein, 8 aa, Homo sapiens
  Heavy chain CDR2
MIPNSGNT

SEQ ID NO: 11466 - protein, 8 aa, Homo sapiens
  Heavy chain CDR2
IWYDGSNK

SEQ ID NO: 11467 - protein, 8 aa, Homo sapiens
  Heavy chain CDR2
IWYDGSNK

SEQ ID NO: 11468 - protein, 8 aa, Homo sapiens
  Heavy chain CDR2
IWYDGSNK

SEQ ID NO: 11469 - protein, 7 aa, Homo sapiens
  Heavy chain CDR2
IYYSGST

SEQ ID NO: 11470 - protein, 8 aa, Homo sapiens
  Heavy chain CDR2
IWYDGSNK

SEQ ID NO: 11471 - protein, 8 aa, Homo sapiens
  Heavy chain CDR2
ISGGGYTI

SEQ ID NO: 11472 - protein, 8 aa, Homo sapiens
  Heavy chain CDR2
ISGGGYTI

SEQ ID NO: 11473 - protein, 8 aa, Homo sapiens
  Heavy chain CDR2
ISGGGYTI

SEQ ID NO: 11474 - protein, 7 aa, Homo sapiens
  Heavy chain CDR2
IYYSGST

SEQ ID NO: 11475 - protein, 8 aa, Homo sapiens
  Heavy chain CDR2
IAYDGSNE

SEQ ID NO: 11476 - protein, 8 aa, Homo sapiens
  Heavy chain CDR2
ISAYSDNT

SEQ ID NO: 11477 - protein, 8 aa, Homo sapiens
  Heavy chain CDR2
IWYDGSNK

SEQ ID NO: 11478 - protein, 8 aa, Homo sapiens
  Heavy chain CDR2
ISAYSDNT

SEQ ID NO: 11479 - protein, 8 aa, Homo sapiens
  Heavy chain CDR2
IWYDGSNK

SEQ ID NO: 11480 - protein, 8 aa, Homo sapiens
  Heavy chain CDR2
IWYDGSNK

SEQ ID NO: 11481 - protein, 8 aa, Homo sapiens
  Heavy chain CDR2
IWYDGSNK

SEQ ID NO: 11482 - protein, 8 aa, Homo sapiens
  Heavy chain CDR2
IWYDGSNK

SEQ ID NO: 11483 - protein, 8 aa, Homo sapiens
  Heavy chain CDR2
IWYDGSNK

SEQ ID NO: 11484 - protein, 8 aa, Homo sapiens
  Heavy chain CDR2
IWYDGSNK

SEQ ID NO: 11485 - protein, 8 aa, Homo sapiens
  Heavy chain CDR2
IWYDGTNK

SEQ ID NO: 11486 - protein, 8 aa, Homo sapiens
  Heavy chain CDR2
FDPEDGET

SEQ ID NO: 11487 - protein, 8 aa, Homo sapiens
  Heavy chain CDR2
IWYDGSIK

SEQ ID NO: 11488 - protein, 8 aa, Homo sapiens
  Heavy chain CDR2
ISGSGGST

SEQ ID NO: 11489 - protein, 8 aa, Homo sapiens
  Heavy chain CDR2
INPSGGST

SEQ ID NO: 11490 - protein, 10 aa, Homo sapiens
  Heavy chain CDR2
IRSKAYGGTT

SEQ ID NO: 11491 - protein, 8 aa, Homo sapiens
  Heavy chain CDR2
IWYDGSNK

SEQ ID NO: 11492 - protein, 8 aa, Homo sapiens
  Heavy chain CDR2
IWYDGSNK

SEQ ID NO: 11493 - protein, 8 aa, Homo sapiens
  Heavy chain CDR2
IWYDGSNK

SEQ ID NO: 11494 - protein, 8 aa, Homo sapiens
  Heavy chain CDR2
IWYDGSNK

SEQ ID NO: 11495 - protein, 8 aa, Homo sapiens
  Heavy chain CDR2
IWYDGSNK

SEQ ID NO: 11496 - protein, 8 aa, Homo sapiens
  Heavy chain CDR2
IWYDGSNK

SEQ ID NO: 11497 - protein, 8 aa, Homo sapiens
  Heavy chain CDR2
IWYDGSNK

SEQ ID NO: 11498 - protein, 8 aa, Homo sapiens
  Heavy chain CDR2
IWYDGSNK

SEQ ID NO: 11499 - protein, 8 aa, Homo sapiens
  Heavy chain CDR2
IWYDGSNK

SEQ ID NO: 11500 - protein, 8 aa, Homo sapiens
  Heavy chain CDR2
IWYDGSNK

SEQ ID NO: 11501 - protein, 8 aa, Homo sapiens
  Heavy chain CDR2
IWYDGSNK

SEQ ID NO: 11502 - protein, 8 aa, Homo sapiens
  Heavy chain CDR2
IWYDGSNK

SEQ ID NO: 11503 - protein, 8 aa, Homo sapiens
  Heavy chain CDR2
IWYDGSNK

SEQ ID NO: 11504 - protein, 8 aa, Homo sapiens
  Heavy chain CDR2
IWYDGSNK

SEQ ID NO: 11505 - protein, 8 aa, Homo sapiens
  Heavy chain CDR2
IWYDGSNK

SEQ ID NO: 11506 - protein, 8 aa, Homo sapiens
  Heavy chain CDR2
IWYDGSNK

SEQ ID NO: 11507 - protein, 8 aa, Homo sapiens
  Heavy chain CDR2
IWYDGSNK

SEQ ID NO: 11508 - protein, 8 aa, Homo sapiens
  Heavy chain CDR2
IWYDGSNK

SEQ ID NO: 11509 - protein, 8 aa, Homo sapiens
  Heavy chain CDR2
IWYDGSNK

SEQ ID NO: 11510 - protein, 8 aa, Homo sapiens
  Heavy chain CDR2
IWYDGSNK

SEQ ID NO: 11511 - protein, 8 aa, Homo sapiens
  Heavy chain CDR2
IWYDGSNK

SEQ ID NO: 11512 - protein, 8 aa, Homo sapiens
  Heavy chain CDR2
IWYDGSNK

SEQ ID NO: 11513 - protein, 8 aa, Homo sapiens
  Heavy chain CDR2
IWYDGSNK

SEQ ID NO: 11514 - protein, 8 aa, Homo sapiens
  Heavy chain CDR2
IWYDGSNK

SEQ ID NO: 11515 - protein, 8 aa, Homo sapiens
  Heavy chain CDR2
IWYDGSNK

SEQ ID NO: 11516 - protein, 8 aa, Homo sapiens
  Heavy chain CDR2
IWYDGSNK

SEQ ID NO: 11517 - protein, 8 aa, Homo sapiens
  Heavy chain CDR2
IWYDGSNK

SEQ ID NO: 11518 - protein, 8 aa, Homo sapiens
  Heavy chain CDR2
IWYDGSNK

SEQ ID NO: 11519 - protein, 8 aa, Homo sapiens
  Heavy chain CDR2
IWYDGGNK

SEQ ID NO: 11520 - protein, 8 aa, Homo sapiens
  Heavy chain CDR2
IWYDGSNK

SEQ ID NO: 11521 - protein, 8 aa, Homo sapiens
  Heavy chain CDR2
IWYDGSNK

SEQ ID NO: 11522 - protein, 8 aa, Homo sapiens
  Heavy chain CDR2
FDPEDGET

SEQ ID NO: 11523 - protein, 8 aa, Homo sapiens
  Heavy chain CDR2
IWYDGSNK

SEQ ID NO: 11524 - protein, 8 aa, Homo sapiens
  Heavy chain CDR2
IWYDGSNK

SEQ ID NO: 11525 - protein, 8 aa, Homo sapiens
  Heavy chain CDR2
IWYDGSNK

SEQ ID NO: 11526 - protein, 8 aa, Homo sapiens
  Heavy chain CDR2
IWYDGSNK

SEQ ID NO: 11527 - protein, 8 aa, Homo sapiens
  Heavy chain CDR2
IWYDGSNK

SEQ ID NO: 11528 - protein, 8 aa, Homo sapiens
  Heavy chain CDR2
IWYDGSNK

SEQ ID NO: 11529 - protein, 8 aa, Homo sapiens
  Heavy chain CDR2
IWYDGSNK

SEQ ID NO: 11530 - protein, 8 aa, Homo sapiens
  Heavy chain CDR2
IWYDGSNK

SEQ ID NO: 11531 - protein, 8 aa, Homo sapiens
  Heavy chain CDR2
IWYDGSNK

SEQ ID NO: 11532 - protein, 8 aa, Homo sapiens
  Heavy chain CDR2
IWYDGSNK

SEQ ID NO: 11533 - protein, 8 aa, Homo sapiens
  Heavy chain CDR2
IWYDGSNK

SEQ ID NO: 11534 - protein, 8 aa, Homo sapiens
  Heavy chain CDR2
IWYDGSNK

SEQ ID NO: 11535 - protein, 8 aa, Homo sapiens
  Heavy chain CDR2
IWYDGSNK

SEQ ID NO: 11536 - protein, 8 aa, Homo sapiens
  Heavy chain CDR2
IWYDGSNK

SEQ ID NO: 11537 - protein, 8 aa, Homo sapiens
  Heavy chain CDR2
IWYDGSNK

SEQ ID NO: 11538 - protein, 8 aa, Homo sapiens
  Heavy chain CDR2
IWYDGSNK

SEQ ID NO: 11539 - protein, 8 aa, Homo sapiens
  Heavy chain CDR2
IWYDGSNK

SEQ ID NO: 11540 - protein, 8 aa, Homo sapiens
  Heavy chain CDR2
IWYDGSNK

SEQ ID NO: 11541 - protein, 8 aa, Homo sapiens
  Heavy chain CDR2
IWYDGSNK

SEQ ID NO: 11542 - protein, 8 aa, Homo sapiens
  Heavy chain CDR2
IWYDGSNK

SEQ ID NO: 11543 - protein, 8 aa, Homo sapiens
  Heavy chain CDR2
IWYDGSNK

SEQ ID NO: 11544 - protein, 8 aa, Homo sapiens
  Heavy chain CDR2
IWYDGSNK

SEQ ID NO: 11545 - protein, 8 aa, Homo sapiens
  Heavy chain CDR2
IWYDGSNK

SEQ ID NO: 11546 - protein, 8 aa, Homo sapiens
  Heavy chain CDR2
IWYDGSNK

SEQ ID NO: 11547 - protein, 8 aa, Homo sapiens
  Heavy chain CDR2
IWYDGSNK

SEQ ID NO: 11548 - protein, 8 aa, Homo sapiens
  Heavy chain CDR2
IWYDGSNK

SEQ ID NO: 11549 - protein, 8 aa, Homo sapiens
  Heavy chain CDR2
IWYDGSNK

SEQ ID NO: 11550 - protein, 8 aa, Homo sapiens
  Heavy chain CDR2
IWYDGSNK

SEQ ID NO: 11551 - protein, 8 aa, Homo sapiens
  Heavy chain CDR2
IWYDGSNK

SEQ ID NO: 11552 - protein, 8 aa, Homo sapiens
  Heavy chain CDR2
IWYDGSNK

SEQ ID NO: 11553 - protein, 8 aa, Homo sapiens
  Heavy chain CDR2
IWYDGSNK

SEQ ID NO: 11554 - protein, 8 aa, Homo sapiens
  Heavy chain CDR2
IWYDGSNK

SEQ ID NO: 11555 - protein, 8 aa, Homo sapiens
  Heavy chain CDR2
IWYDGSNK

SEQ ID NO: 11556 - protein, 8 aa, Homo sapiens
  Heavy chain CDR2
IWYDGSNK

SEQ ID NO: 11557 - protein, 8 aa, Homo sapiens
  Heavy chain CDR2
IWYDGSNK

SEQ ID NO: 11558 - protein, 8 aa, Homo sapiens
  Heavy chain CDR2
IWYDGSNK

SEQ ID NO: 11559 - protein, 8 aa, Homo sapiens
  Heavy chain CDR2
IWYDGSNK

SEQ ID NO: 11560 - protein, 8 aa, Homo sapiens
  Heavy chain CDR2
IWYDGSNK

SEQ ID NO: 11561 - protein, 8 aa, Homo sapiens
  Heavy chain CDR2
IWYDGSNK

SEQ ID NO: 11562 - protein, 8 aa, Homo sapiens
  Heavy chain CDR2
IWYDGSNK

SEQ ID NO: 11563 - protein, 8 aa, Homo sapiens
  Heavy chain CDR2
IWYDGSNK

SEQ ID NO: 11564 - protein, 8 aa, Homo sapiens
  Heavy chain CDR2
IWYDGSNK

SEQ ID NO: 11565 - protein, 8 aa, Homo sapiens
  Heavy chain CDR2
IWYDGSNK

SEQ ID NO: 11566 - protein, 8 aa, Homo sapiens
  Heavy chain CDR2
IWYDGSNK

SEQ ID NO: 11567 - protein, 8 aa, Homo sapiens
  Heavy chain CDR2
IWYDGSNK

SEQ ID NO: 11568 - protein, 8 aa, Homo sapiens
  Heavy chain CDR2
IWYDGSNK

SEQ ID NO: 11569 - protein, 8 aa, Homo sapiens
  Heavy chain CDR2
IWYDGSNK

SEQ ID NO: 11570 - protein, 8 aa, Homo sapiens
  Heavy chain CDR2
ISAYSDNT

SEQ ID NO: 11571 - protein, 8 aa, Homo sapiens
  Heavy chain CDR2
IWYDGSNK

SEQ ID NO: 11572 - protein, 8 aa, Homo sapiens
  Heavy chain CDR2
IWYDGSNK

SEQ ID NO: 11573 - protein, 8 aa, Homo sapiens
  Heavy chain CDR2
ISAYSDNT

SEQ ID NO: 11574 - protein, 8 aa, Homo sapiens
  Heavy chain CDR2
IWYDGSIK

SEQ ID NO: 11575 - protein, 8 aa, Homo sapiens
  Heavy chain CDR2
ISAYSDNT

SEQ ID NO: 11576 - protein, 8 aa, Homo sapiens
  Heavy chain CDR2
IWYDGSKK

SEQ ID NO: 11577 - protein, 8 aa, Homo sapiens
  Heavy chain CDR2
IWYDGSNK

SEQ ID NO: 11578 - protein, 8 aa, Homo sapiens
  Heavy chain CDR2
ISAYSDNT

SEQ ID NO: 11579 - protein, 8 aa, Homo sapiens
  Heavy chain CDR2
ISAYSDNT

SEQ ID NO: 11580 - protein, 7 aa, Homo sapiens
  Heavy chain CDR2
IYYSGST

SEQ ID NO: 11581 - protein, 8 aa, Homo sapiens
  Heavy chain CDR2
IWYDGSNK

SEQ ID NO: 11582 - protein, 7 aa, Homo sapiens
  Heavy chain CDR2
IYYSGST

SEQ ID NO: 11583 - protein, 8 aa, Homo sapiens
  Heavy chain CDR2
TWYDGGNK

SEQ ID NO: 11584 - protein, 8 aa, Homo sapiens
  Heavy chain CDR2
IWYDGSNK

SEQ ID NO: 11585 - protein, 8 aa, Homo sapiens
  Heavy chain CDR2
IWYDGSNK

SEQ ID NO: 11586 - protein, 8 aa, Homo sapiens
  Heavy chain CDR2
IWYDGSNK

SEQ ID NO: 11587 - protein, 8 aa, Homo sapiens
  Heavy chain CDR2
IWYDGSNK

SEQ ID NO: 11588 - protein, 8 aa, Homo sapiens
  Heavy chain CDR2
IWYDGSNK

SEQ ID NO: 11589 - protein, 8 aa, Homo sapiens
  Heavy chain CDR2
IWYDGSNK

SEQ ID NO: 11590 - protein, 8 aa, Homo sapiens
  Heavy chain CDR2
IWYDGSNK

SEQ ID NO: 11591 - protein, 8 aa, Homo sapiens
  Heavy chain CDR2
IWYDGSNK

SEQ ID NO: 11592 - protein, 8 aa, Homo sapiens
  Heavy chain CDR2
IWYDGSNK

SEQ ID NO: 11593 - protein, 8 aa, Homo sapiens
  Heavy chain CDR2
IWYDGSNK

SEQ ID NO: 11594 - protein, 8 aa, Homo sapiens
  Heavy chain CDR2
IWYDGSNK

SEQ ID NO: 11595 - protein, 8 aa, Homo sapiens
  Heavy chain CDR2
IWYDGSNK

SEQ ID NO: 11596 - protein, 8 aa, Homo sapiens
  Heavy chain CDR2
IWYDGSNK

SEQ ID NO: 11597 - protein, 8 aa, Homo sapiens
  Heavy chain CDR2
IWYDGSNK

SEQ ID NO: 11598 - protein, 8 aa, Homo sapiens
  Heavy chain CDR2
IWYDGSNK

SEQ ID NO: 11599 - protein, 8 aa, Homo sapiens
  Heavy chain CDR2
IWYDGSNK

SEQ ID NO: 11600 - protein, 8 aa, Homo sapiens
  Heavy chain CDR2
IWYDGSNK

SEQ ID NO: 11601 - protein, 8 aa, Homo sapiens
  Heavy chain CDR2
ISAYSDNT

SEQ ID NO: 11602 - protein, 8 aa, Homo sapiens
  Heavy chain CDR2
ISVYSDNT

SEQ ID NO: 11603 - protein, 7 aa, Homo sapiens
  Heavy chain CDR2
IYYSGST

SEQ ID NO: 11604 - protein, 8 aa, Homo sapiens
  Heavy chain CDR2
ISAYSDNT

SEQ ID NO: 11605 - protein, 8 aa, Homo sapiens
  Heavy chain CDR2
ISGSGNST

SEQ ID NO: 11606 - protein, 7 aa, Homo sapiens
  Heavy chain CDR2
IHDRGST

SEQ ID NO: 11607 - protein, 8 aa, Homo sapiens
  Heavy chain CDR2
IWYDGSNK

SEQ ID NO: 11608 - protein, 8 aa, Homo sapiens
  Heavy chain CDR2
ISAYSGNT

SEQ ID NO: 11609 - protein, 8 aa, Homo sapiens
  Heavy chain CDR2
ISAYSDNT

SEQ ID NO: 11610 - protein, 8 aa, Homo sapiens
  Heavy chain CDR2
IWYDGSIK

SEQ ID NO: 11611 - protein, 8 aa, Homo sapiens
  Heavy chain CDR2
IWYDGSIK

SEQ ID NO: 11612 - protein, 8 aa, Homo sapiens
  Heavy chain CDR2
IWYDGSIK

SEQ ID NO: 11613 - protein, 8 aa, Homo sapiens
  Heavy chain CDR2
IWYDGSIK

SEQ ID NO: 11614 - protein, 8 aa, Homo sapiens
  Heavy chain CDR2
IWYDGSIK

SEQ ID NO: 11615 - protein, 8 aa, Homo sapiens
  Heavy chain CDR2
IWYDGSIK

SEQ ID NO: 11616 - protein, 8 aa, Homo sapiens
  Heavy chain CDR2
IWYDGSIK

SEQ ID NO: 11617 - protein, 8 aa, Homo sapiens
  Heavy chain CDR2
IWYDGSIK

SEQ ID NO: 11618 - protein, 8 aa, Homo sapiens
  Heavy chain CDR2
IWYDGSIK

SEQ ID NO: 11619 - protein, 8 aa, Homo sapiens
  Heavy chain CDR2
IWYDGSIK

SEQ ID NO: 11620 - protein, 8 aa, Homo sapiens
  Heavy chain CDR2
ISAYSDNT

SEQ ID NO: 11621 - protein, 8 aa, Homo sapiens
  Heavy chain CDR2
IWYDGSIK

SEQ ID NO: 11622 - protein, 8 aa, Homo sapiens
  Heavy chain CDR2
ISAYSDNT

SEQ ID NO: 11623 - protein, 8 aa, Homo sapiens
  Heavy chain CDR2
IWYDGSNK

SEQ ID NO: 11624 - protein, 8 aa, Homo sapiens
  Heavy chain CDR2
ISAYNGNT

SEQ ID NO: 11625 - protein, 8 aa, Homo sapiens
  Heavy chain CDR2
ISAYSDNT

SEQ ID NO: 11626 - protein, 8 aa, Homo sapiens
  Heavy chain CDR2
ISGGGYTI

SEQ ID NO: 11627 - protein, 8 aa, Homo sapiens
  Heavy chain CDR2
ISAYSDNT

SEQ ID NO: 11628 - protein, 8 aa, Homo sapiens
  Heavy chain CDR2
VSAYSGNT

SEQ ID NO: 11629 - protein, 8 aa, Homo sapiens
  Heavy chain CDR2
VSAYSGNT

SEQ ID NO: 11630 - protein, 8 aa, Homo sapiens
  Heavy chain CDR2
ISAYSDNI

SEQ ID NO: 11631 - protein, 8 aa, Homo sapiens
  Heavy chain CDR2
ISAHNGNT

SEQ ID NO: 11632 - protein, 8 aa, Homo sapiens
  Heavy chain CDR2
ISAYSDNS

SEQ ID NO: 11633 - protein, 8 aa, Homo sapiens
  Heavy chain CDR2
ISAYSDNI

SEQ ID NO: 11634 - protein, 8 aa, Homo sapiens
  Heavy chain CDR2
ISAYSDNT

SEQ ID NO: 11635 - protein, 8 aa, Homo sapiens
  Heavy chain CDR2
ISAYSDNT

SEQ ID NO: 11636 - protein, 8 aa, Homo sapiens
  Heavy chain CDR2
ISAYSDNT

SEQ ID NO: 11637 - protein, 8 aa, Homo sapiens
  Heavy chain CDR2
ISAYSDNT

SEQ ID NO: 11638 - protein, 8 aa, Homo sapiens
  Heavy chain CDR2
ISAYSDNT

SEQ ID NO: 11639 - protein, 8 aa, Homo sapiens
  Heavy chain CDR2
INGNGGVI

SEQ ID NO: 11640 - protein, 8 aa, Homo sapiens
  Heavy chain CDR2
ISAYSDNT

SEQ ID NO: 11641 - protein, 8 aa, Homo sapiens
  Heavy chain CDR2
ISGSGGST

SEQ ID NO: 11642 - protein, 8 aa, Homo sapiens
  Heavy chain CDR2
ISAYSDNT

SEQ ID NO: 11643 - protein, 8 aa, Homo sapiens
  Heavy chain CDR2
ISAYSDNT

SEQ ID NO: 11644 - protein, 8 aa, Homo sapiens
  Heavy chain CDR2
ISAYSDNT

SEQ ID NO: 11645 - protein, 8 aa, Homo sapiens
  Heavy chain CDR2
IWYDGSNK

SEQ ID NO: 11646 - protein, 8 aa, Homo sapiens
  Heavy chain CDR2
IWYDGSIK

SEQ ID NO: 11647 - protein, 7 aa, Homo sapiens
  Heavy chain CDR2
TYYSGST

SEQ ID NO: 11648 - protein, 8 aa, Homo sapiens
  Heavy chain CDR2
ISAYSDNT

SEQ ID NO: 11649 - protein, 8 aa, Homo sapiens
  Heavy chain CDR2
ISAYSDNT

SEQ ID NO: 11650 - protein, 8 aa, Homo sapiens
  Heavy chain CDR2
ISAYSDNT

SEQ ID NO: 11651 - protein, 8 aa, Homo sapiens
  Heavy chain CDR2
ISAYSDNT

SEQ ID NO: 11652 - protein, 8 aa, Homo sapiens
  Heavy chain CDR2
ISAYSDNT

SEQ ID NO: 11653 - protein, 8 aa, Homo sapiens
  Heavy chain CDR2
IWYDGSNK

SEQ ID NO: 11654 - protein, 8 aa, Homo sapiens
  Heavy chain CDR2
ISAYSDNS

SEQ ID NO: 11655 - protein, 8 aa, Homo sapiens
  Heavy chain CDR2
ISAYSDNT

SEQ ID NO: 11656 - protein, 8 aa, Homo sapiens
  Heavy chain CDR2
ISAYSDNT

SEQ ID NO: 11657 - protein, 8 aa, Homo sapiens
  Heavy chain CDR2
ISAYSDNT

SEQ ID NO: 11658 - protein, 8 aa, Homo sapiens
  Heavy chain CDR2
ISAYSDNT

SEQ ID NO: 11659 - protein, 8 aa, Homo sapiens
  Heavy chain CDR2
ISAYSDNT

SEQ ID NO: 11660 - protein, 8 aa, Homo sapiens
  Heavy chain CDR2
IWYDGSNK

SEQ ID NO: 11661 - protein, 16 aa, Homo sapiens
  Heavy chain CDR3
ARDYYGSGRRYYGMDV

SEQ ID NO: 11662 - protein, 16 aa, Homo sapiens
  Heavy chain CDR3
ARDYYGSGRRYYGMDV

SEQ ID NO: 11663 - protein, 16 aa, Homo sapiens
  Heavy chain CDR3
ARDYYGSGRRYYGMDV

SEQ ID NO: 11664 - protein, 16 aa, Homo sapiens
  Heavy chain CDR3
ARDYYGSGRRYYGMDV

SEQ ID NO: 11665 - protein, 16 aa, Homo sapiens
  Heavy chain CDR3
ARDYYGSGSRYYGMDV

SEQ ID NO: 11666 - protein, 16 aa, Homo sapiens
  Heavy chain CDR3
ARDYYGSGRRYYGMDV

SEQ ID NO: 11667 - protein, 16 aa, Homo sapiens
  Heavy chain CDR3
ARDYYGSGRRYYGMDV

SEQ ID NO: 11668 - protein, 16 aa, Homo sapiens
  Heavy chain CDR3
ARDYDGSGRRYYGMDV

SEQ ID NO: 11669 - protein, 16 aa, Homo sapiens
  Heavy chain CDR3
ARDYYGSGRRYYGMDV

SEQ ID NO: 11670 - protein, 16 aa, Homo sapiens
  Heavy chain CDR3
ARDYYGSGRRYYGMDV

SEQ ID NO: 11671 - protein, 16 aa, Homo sapiens
  Heavy chain CDR3
ARDYYGSGRRYYGMDV

SEQ ID NO: 11672 - protein, 16 aa, Homo sapiens
  Heavy chain CDR3
ARDYYGSGRRYYGMDV

SEQ ID NO: 11673 - protein, 16 aa, Homo sapiens
  Heavy chain CDR3
ARDYYGSGRRYYGMDV

SEQ ID NO: 11674 - protein, 16 aa, Homo sapiens
  Heavy chain CDR3
ATPVLRYFDWRDAFDI

SEQ ID NO: 11675 - protein, 16 aa, Homo sapiens
  Heavy chain CDR3
ARDYYGSGRRYCGMDV

SEQ ID NO: 11676 - protein, 16 aa, Homo sapiens
  Heavy chain CDR3
ARDYYGPGRRYYGMDV

SEQ ID NO: 11677 - protein, 16 aa, Homo sapiens
  Heavy chain CDR3
ARDYYGSGRRYYGMDV

SEQ ID NO: 11678 - protein, 16 aa, Homo sapiens
  Heavy chain CDR3
ARDYYGSGRRYYGMDV

SEQ ID NO: 11679 - protein, 16 aa, Homo sapiens
  Heavy chain CDR3
ARDYYGSGSRYYGMDV

SEQ ID NO: 11680 - protein, 16 aa, Homo sapiens
  Heavy chain CDR3
ARDYYGSGSRYYGMDV

SEQ ID NO: 11681 - protein, 8 aa, Homo sapiens
  Heavy chain CDR3
TTSTGGDY

SEQ ID NO: 11682 - protein, 16 aa, Homo sapiens
  Heavy chain CDR3
ARDYYGSGSRYYGMDV

SEQ ID NO: 11683 - protein, 16 aa, Homo sapiens
  Heavy chain CDR3
ARDYYGSGRRYYGIDV

SEQ ID NO: 11684 - protein, 16 aa, Homo sapiens
  Heavy chain CDR3
ARDYYGSGSRYYGMDV

SEQ ID NO: 11685 - protein, 16 aa, Homo sapiens
  Heavy chain CDR3
ARDYYGSGSRYYGMDV

SEQ ID NO: 11686 - protein, 16 aa, Homo sapiens
  Heavy chain CDR3
ARDYYGSVRRYYGMDV

SEQ ID NO: 11687 - protein, 16 aa, Homo sapiens
  Heavy chain CDR3
ARDYDGSGRRYYGMDV

SEQ ID NO: 11688 - protein, 16 aa, Homo sapiens
  Heavy chain CDR3
ARDYYGSGRRYYGMDV

SEQ ID NO: 11689 - protein, 16 aa, Homo sapiens
  Heavy chain CDR3
ATPVLRYFDWRDAFDI

SEQ ID NO: 11690 - protein, 16 aa, Homo sapiens
  Heavy chain CDR3
ATPVLRYFDWRDAFDI

SEQ ID NO: 11691 - protein, 12 aa, Homo sapiens
  Heavy chain CDR3
SRDRNIAKAFDI

SEQ ID NO: 11692 - protein, 16 aa, Homo sapiens
  Heavy chain CDR3
ARDYYGSGRRYYGMDV

SEQ ID NO: 11693 - protein, 16 aa, Homo sapiens
  Heavy chain CDR3
ARDYCGSGRRYYGMDV

SEQ ID NO: 11694 - protein, 16 aa, Homo sapiens
  Heavy chain CDR3
ARDYDGSGRRYYGMDV

SEQ ID NO: 11695 - protein, 16 aa, Homo sapiens
  Heavy chain CDR3
AGDYYGSGRRYYGMDV

SEQ ID NO: 11696 - protein, 16 aa, Homo sapiens
  Heavy chain CDR3
ARDYYGSGRRYYGMDY

SEQ ID NO: 11697 - protein, 16 aa, Homo sapiens
  Heavy chain CDR3
ARDYYGSGRRYYGMDV

SEQ ID NO: 11698 - protein, 16 aa, Homo sapiens
  Heavy chain CDR3
ARDYYGSGRRYYGMDV

SEQ ID NO: 11699 - protein, 16 aa, Homo sapiens
  Heavy chain CDR3
ATPVLRYFDWRDAFDI

SEQ ID NO: 11700 - protein, 16 aa, Homo sapiens
  Heavy chain CDR3
ARDYYGSGSRYYGMDV

SEQ ID NO: 11701 - protein, 16 aa, Homo sapiens
  Heavy chain CDR3
ARDYYGSGRRYYGMDV

SEQ ID NO: 11702 - protein, 16 aa, Homo sapiens
  Heavy chain CDR3
ARDYDGSGRRYYGMDV

SEQ ID NO: 11703 - protein, 16 aa, Homo sapiens
  Heavy chain CDR3
ARDYDGSGRRYYGMDV

SEQ ID NO: 11704 - protein, 16 aa, Homo sapiens
  Heavy chain CDR3
ARDYYGSGSRYYGMDV

SEQ ID NO: 11705 - protein, 16 aa, Homo sapiens
  Heavy chain CDR3
ARDYYGSGRRYYGMDV

SEQ ID NO: 11706 - protein, 16 aa, Homo sapiens
  Heavy chain CDR3
ARDYYGSGRRYYGMDV

SEQ ID NO: 11707 - protein, 16 aa, Homo sapiens
  Heavy chain CDR3
ARDYDGSGRRYYGMDV

SEQ ID NO: 11708 - protein, 16 aa, Homo sapiens
  Heavy chain CDR3
ARDYDGSGRRYYGMDV

SEQ ID NO: 11709 - protein, 16 aa, Homo sapiens
  Heavy chain CDR3
ARDYYGSGSRYYGMDV

SEQ ID NO: 11710 - protein, 16 aa, Homo sapiens
  Heavy chain CDR3
ARDYYGSGRRYYGMDV

SEQ ID NO: 11711 - protein, 16 aa, Homo sapiens
  Heavy chain CDR3
ARDYYGSGRRYYGMDV

SEQ ID NO: 11712 - protein, 16 aa, Homo sapiens
  Heavy chain CDR3
ARDYYGSGRRYYGMDV

SEQ ID NO: 11713 - protein, 12 aa, Homo sapiens
  Heavy chain CDR3
SRDRNIAKAFDI

SEQ ID NO: 11714 - protein, 16 aa, Homo sapiens
  Heavy chain CDR3
ARDYYGSGRRYYGMDV

SEQ ID NO: 11715 - protein, 16 aa, Homo sapiens
  Heavy chain CDR3
ARDYYGSGRRYYGMDV

SEQ ID NO: 11716 - protein, 8 aa, Homo sapiens
  Heavy chain CDR3
TTSTGSDY

SEQ ID NO: 11717 - protein, 16 aa, Homo sapiens
  Heavy chain CDR3
ARDYYGSGRRYCGMDV

SEQ ID NO: 11718 - protein, 16 aa, Homo sapiens
  Heavy chain CDR3
ARDYYGSGRLYYGMDV

SEQ ID NO: 11719 - protein, 16 aa, Homo sapiens
  Heavy chain CDR3
ARDYYGSGRRYYGMDV

SEQ ID NO: 11720 - protein, 16 aa, Homo sapiens
  Heavy chain CDR3
ARDYYGSGSRYYGMDV

SEQ ID NO: 11721 - protein, 16 aa, Homo sapiens
  Heavy chain CDR3
ARDYYGSGRRYYGMDV

SEQ ID NO: 11722 - protein, 16 aa, Homo sapiens
  Heavy chain CDR3
ARDYDGSGRRYYGMDV

SEQ ID NO: 11723 - protein, 16 aa, Homo sapiens
  Heavy chain CDR3
ARDCYGSGRRYYGMDV

SEQ ID NO: 11724 - protein, 16 aa, Homo sapiens
  Heavy chain CDR3
ARDYYGSGRRYYGMDV

SEQ ID NO: 11725 - protein, 13 aa, Homo sapiens
  Heavy chain CDR3
ARDILTGYYAFDI

SEQ ID NO: 11726 - protein, 16 aa, Homo sapiens
  Heavy chain CDR3
ATPVLRYFDWRDAFDI

SEQ ID NO: 11727 - protein, 16 aa, Homo sapiens
  Heavy chain CDR3
ATPVLRYFDWRDAFDI

SEQ ID NO: 11728 - protein, 16 aa, Homo sapiens
  Heavy chain CDR3
ARDYYGSGRRYYGMDV

SEQ ID NO: 11729 - protein, 14 aa, Homo sapiens
  Heavy chain CDR3
TREGYSSGPNWFDP

SEQ ID NO: 11730 - protein, 16 aa, Homo sapiens
  Heavy chain CDR3
ARDYYGSGRRYYGMDV

SEQ ID NO: 11731 - protein, 13 aa, Homo sapiens
  Heavy chain CDR3
ARDIFTGYYAFDI

SEQ ID NO: 11732 - protein, 13 aa, Homo sapiens
  Heavy chain CDR3
ARDMLTGYYAFDI

SEQ ID NO: 11733 - protein, 13 aa, Homo sapiens
  Heavy chain CDR3
ARDSLTGYYAFDI

SEQ ID NO: 11734 - protein, 13 aa, Homo sapiens
  Heavy chain CDR3
ARDIVTGYYAFDI

SEQ ID NO: 11735 - protein, 13 aa, Homo sapiens
  Heavy chain CDR3
ERDILTGYYAFDI

SEQ ID NO: 11736 - protein, 13 aa, Homo sapiens
  Heavy chain CDR3
AGDILTGYYAFDI

SEQ ID NO: 11737 - protein, 13 aa, Homo sapiens
  Heavy chain CDR3
AISYGDYVRYFDY

SEQ ID NO: 11738 - protein, 13 aa, Homo sapiens
  Heavy chain CDR3
ARDILTCYYAFDI

SEQ ID NO: 11739 - protein, 13 aa, Homo sapiens
  Heavy chain CDR3
ARDILTGYYAFDI

SEQ ID NO: 11740 - protein, 16 aa, Homo sapiens
  Heavy chain CDR3
ATPVLRYFDWRDAFDI

SEQ ID NO: 11741 - protein, 13 aa, Homo sapiens
  Heavy chain CDR3
ARVTGTTGGYFDY

SEQ ID NO: 11742 - protein, 16 aa, Homo sapiens
  Heavy chain CDR3
ATPVLRYFDWRDAFDI

SEQ ID NO: 11743 - protein, 16 aa, Homo sapiens
  Heavy chain CDR3
ATAVLRYFDWRDAFDI

SEQ ID NO: 11744 - protein, 16 aa, Homo sapiens
  Heavy chain CDR3
ATPVLRYFDWRDAFDI

SEQ ID NO: 11745 - protein, 16 aa, Homo sapiens
  Heavy chain CDR3
ATPVLRYFDWRDAFDI

SEQ ID NO: 11746 - protein, 16 aa, Homo sapiens
  Heavy chain CDR3
ATPVLRYFDWRDAFDI

SEQ ID NO: 11747 - protein, 16 aa, Homo sapiens
  Heavy chain CDR3
ATPVLRYFDWRDAFDI

SEQ ID NO: 11748 - protein, 19 aa, Homo sapiens
  Heavy chain CDR3
AKEYCSSTRCYNYYYGMDV

SEQ ID NO: 11749 - protein, 16 aa, Homo sapiens
  Heavy chain CDR3
ATPVLRYVDWRDAFDI

SEQ ID NO: 11750 - protein, 13 aa, Homo sapiens
  Heavy chain CDR3
ARVTGTTGGYFDY

SEQ ID NO: 11751 - protein, 21 aa, Homo sapiens
  Heavy chain CDR3
AKDRGITMVRGVILYYYGMDV

SEQ ID NO: 11752 - protein, 16 aa, Homo sapiens
  Heavy chain CDR3
AAPVLRYFDWRDAFDI

SEQ ID NO: 11753 - protein, 16 aa, Homo sapiens
  Heavy chain CDR3
ATPGLRYFDWRDAFDI

SEQ ID NO: 11754 - protein, 16 aa, Homo sapiens
  Heavy chain CDR3
ATPVLRYFDCRDAFDI

SEQ ID NO: 11755 - protein, 9 aa, Homo sapiens
  Heavy chain CDR3
TRGPYGMDV

SEQ ID NO: 11756 - protein, 16 aa, Homo sapiens
  Heavy chain CDR3
ATPVVRYFDWRDAFDI

SEQ ID NO: 11757 - protein, 16 aa, Homo sapiens
  Heavy chain CDR3
ATPVLRYFDWRDAFDI

SEQ ID NO: 11758 - protein, 16 aa, Homo sapiens
  Heavy chain CDR3
ATPELRYFDWRDAFDI

SEQ ID NO: 11759 - protein, 16 aa, Homo sapiens
  Heavy chain CDR3
ATPVLRYFDWMDAFDI

SEQ ID NO: 11760 - protein, 16 aa, Homo sapiens
  Heavy chain CDR3
ATPVLRYCDWRDAFDI

SEQ ID NO: 11761 - protein, 16 aa, Homo sapiens
  Heavy chain CDR3
ATSVLRYFDWRDAFDI

SEQ ID NO: 11762 - protein, 16 aa, Homo sapiens
  Heavy chain CDR3
ATPVLRYFDWRDAFDI

SEQ ID NO: 11763 - protein, 16 aa, Homo sapiens
  Heavy chain CDR3
AKEGPPSGSYYKVFDY

SEQ ID NO: 11764 - protein, 13 aa, Homo sapiens
  Heavy chain CDR3
ARVTGTAGGYFDY

SEQ ID NO: 11765 - protein, 7 aa, Homo sapiens
  Heavy chain CDR3
AVNPFDY

SEQ ID NO: 11766 - protein, 12 aa, Homo sapiens
  Heavy chain CDR3
ARDLGVTEEFDY

SEQ ID NO: 11767 - protein, 7 aa, Homo sapiens
  Heavy chain CDR3
AVNPFDY

SEQ ID NO: 11768 - protein, 12 aa, Homo sapiens
  Heavy chain CDR3
ARDLGVTEEFDY

SEQ ID NO: 11769 - protein, 7 aa, Homo sapiens
  Heavy chain CDR3
AVNPFDY

SEQ ID NO: 11770 - protein, 12 aa, Homo sapiens
  Heavy chain CDR3
ARDLGVTEEFDY

SEQ ID NO: 11771 - protein, 7 aa, Homo sapiens
  Heavy chain CDR3
AVNPFDY

SEQ ID NO: 11772 - protein, 12 aa, Homo sapiens
  Heavy chain CDR3
ARDLGVTEEFDY

SEQ ID NO: 11773 - protein, 12 aa, Homo sapiens
  Heavy chain CDR3
ARDLGVTEEFDY

SEQ ID NO: 11774 - protein, 7 aa, Homo sapiens
  Heavy chain CDR3
AVSPFDY

SEQ ID NO: 11775 - protein, 12 aa, Homo sapiens
  Heavy chain CDR3
ARDLGVTEEFDY

SEQ ID NO: 11776 - protein, 7 aa, Homo sapiens
  Heavy chain CDR3
AVNPFDY

SEQ ID NO: 11777 - protein, 6 aa, Homo sapiens
  Heavy chain CDR3
ATEGDY

SEQ ID NO: 11778 - protein, 11 aa, Homo sapiens
  Heavy chain CDR3
ARDEGATFFDY

SEQ ID NO: 11779 - protein, 11 aa, Homo sapiens
  Heavy chain CDR3
ARDEGATFFDH

SEQ ID NO: 11780 - protein, 11 aa, Homo sapiens
  Heavy chain CDR3
AGDILTGSFDY

SEQ ID NO: 11781 - protein, 11 aa, Homo sapiens
  Heavy chain CDR3
AVDILTGSFDY

SEQ ID NO: 11782 - protein, 13 aa, Homo sapiens
  Heavy chain CDR3
AKKRLYSSAWYDY

SEQ ID NO: 11783 - protein, 7 aa, Homo sapiens
  Heavy chain CDR3
ASNPFDY

SEQ ID NO: 11784 - protein, 7 aa, Homo sapiens
  Heavy chain CDR3
TVNPFDY

SEQ ID NO: 11785 - protein, 11 aa, Homo sapiens
  Heavy chain CDR3
ARDEGATFFDY

SEQ ID NO: 11786 - protein, 6 aa, Homo sapiens
  Heavy chain CDR3
AAEGDY

SEQ ID NO: 11787 - protein, 6 aa, Homo sapiens
  Heavy chain CDR3
ATEGDY

SEQ ID NO: 11788 - protein, 15 aa, Homo sapiens
  Heavy chain CDR3
ARRYYGSVSYYGMDV

SEQ ID NO: 11789 - protein, 6 aa, Homo sapiens
  Heavy chain CDR3
STEGDY

SEQ ID NO: 11790 - protein, 6 aa, Homo sapiens
  Heavy chain CDR3
ATDGDY

SEQ ID NO: 11791 - protein, 6 aa, Homo sapiens
  Heavy chain CDR3
ATEVDY

SEQ ID NO: 11792 - protein, 6 aa, Homo sapiens
  Heavy chain CDR3
ASEGDY

SEQ ID NO: 11793 - protein, 11 aa, Homo sapiens
  Heavy chain CDR3
AGDILTGSFDY

SEQ ID NO: 11794 - protein, 6 aa, Homo sapiens
  Heavy chain CDR3
ATEGDY

SEQ ID NO: 11795 - protein, 6 aa, Homo sapiens
  Heavy chain CDR3
VTEGDY

SEQ ID NO: 11796 - protein, 6 aa, Homo sapiens
  Heavy chain CDR3
TTEGDY

SEQ ID NO: 11797 - protein, 9 aa, Homo sapiens
  Heavy chain CDR3
ARGTGVLDY

SEQ ID NO: 11798 - protein, 9 aa, Homo sapiens
  Heavy chain CDR3
ARGTGVLDY

SEQ ID NO: 11799 - protein, 21 aa, Homo sapiens
  Heavy chain CDR3
ARDRNYYGSGSYYDDYYGMDV

SEQ ID NO: 11800 - protein, 21 aa, Homo sapiens
  Heavy chain CDR3
ARDRNYYGSGSYYDDYYGMDV

SEQ ID NO: 11801 - protein, 15 aa, Homo sapiens
  Heavy chain CDR3
ASVLRYFDWFFPPGY

SEQ ID NO: 11802 - protein, 9 aa, Homo sapiens
  Heavy chain CDR3
ARGTGVIDY

SEQ ID NO: 11803 - protein, 9 aa, Homo sapiens
  Heavy chain CDR3
ARGTGVIDY

SEQ ID NO: 11804 - protein, 9 aa, Homo sapiens
  Heavy chain CDR3
ARGTGVLDY

SEQ ID NO: 11805 - protein, 21 aa, Homo sapiens
  Heavy chain CDR3
ARDRNYYGSGSYYDDYYGMDV

SEQ ID NO: 11806 - protein, 9 aa, Homo sapiens
  Heavy chain CDR3
ARGTGDLDY

SEQ ID NO: 11807 - protein, 9 aa, Homo sapiens
  Heavy chain CDR3
ARGTGALDY

SEQ ID NO: 11808 - protein, 9 aa, Homo sapiens
  Heavy chain CDR3
ARGTGVLDS

SEQ ID NO: 11809 - protein, 9 aa, Homo sapiens
  Heavy chain CDR3
ARGTGVLDY

SEQ ID NO: 11810 - protein, 9 aa, Homo sapiens
  Heavy chain CDR3
ARVTGVLDY

SEQ ID NO: 11811 - protein, 9 aa, Homo sapiens
  Heavy chain CDR3
ASGTGVLDY

SEQ ID NO: 11812 - protein, 21 aa, Homo sapiens
  Heavy chain CDR3
ARDRNYYGSGSYYDDYYGMDV

SEQ ID NO: 11813 - protein, 9 aa, Homo sapiens
  Heavy chain CDR3
ARGTGALDY

SEQ ID NO: 11814 - protein, 9 aa, Homo sapiens
  Heavy chain CDR3
ARGTGDLDY

SEQ ID NO: 11815 - protein, 9 aa, Homo sapiens
  Heavy chain CDR3
ARGTGVLDS

SEQ ID NO: 11816 - protein, 9 aa, Homo sapiens
  Heavy chain CDR3
ARGPGVLDY

SEQ ID NO: 11817 - protein, 9 aa, Homo sapiens
  Heavy chain CDR3
ASGTGVLDY

SEQ ID NO: 11818 - protein, 9 aa, Homo sapiens
  Heavy chain CDR3
ARVTGVLDY

SEQ ID NO: 11819 - protein, 9 aa, Homo sapiens
  Heavy chain CDR3
ARGTGGLDY

SEQ ID NO: 11820 - protein, 9 aa, Homo sapiens
  Heavy chain CDR3
ARGTGVFDY

SEQ ID NO: 11821 - protein, 9 aa, Homo sapiens
  Heavy chain CDR3
ARGTGVLDY

SEQ ID NO: 11822 - protein, 21 aa, Homo sapiens
  Heavy chain CDR3
ARDRKYYGSGSYYDDYYGMDV

SEQ ID NO: 11823 - protein, 21 aa, Homo sapiens
  Heavy chain CDR3
ARDRNYDGSGSYYDDYYGMDV

SEQ ID NO: 11824 - protein, 21 aa, Homo sapiens
  Heavy chain CDR3
ARDRNYYGSGSYYDDYYGMDV

SEQ ID NO: 11825 - protein, 9 aa, Homo sapiens
  Heavy chain CDR3
ARGTGVLDY

SEQ ID NO: 11826 - protein, 10 aa, Homo sapiens
  Heavy chain CDR3
AGGGNYYGDF

SEQ ID NO: 11827 - protein, 19 aa, Homo sapiens
  Heavy chain CDR3
ARRYYDILTEGGYYYVLDV

SEQ ID NO: 11828 - protein, 11 aa, Homo sapiens
  Heavy chain CDR3
AGGGDILTGDY

SEQ ID NO: 11829 - protein, 17 aa, Homo sapiens
  Heavy chain CDR3
ARGYCSTTNCFADYFDY

SEQ ID NO: 11830 - protein, 10 aa, Homo sapiens
  Heavy chain CDR3
AGGGSYYGDY

SEQ ID NO: 11831 - protein, 14 aa, Homo sapiens
  Heavy chain CDR3
ARYGVWGSYRSLDY

SEQ ID NO: 11832 - protein, 10 aa, Homo sapiens
  Heavy chain CDR3
AGGGSYYGDH

SEQ ID NO: 11833 - protein, 10 aa, Homo sapiens
  Heavy chain CDR3
AGGGNYYGDY

SEQ ID NO: 11834 - protein, 10 aa, Homo sapiens
  Heavy chain CDR3
AGGGNYYGDY

SEQ ID NO: 11835 - protein, 10 aa, Homo sapiens
  Heavy chain CDR3
AGGGSYYGDY

SEQ ID NO: 11836 - protein, 19 aa, Homo sapiens
  Heavy chain CDR3
ARRYYDILTEGGYYYVMDV

SEQ ID NO: 11837 - protein, 10 aa, Homo sapiens
  Heavy chain CDR3
AGGGNYYGDY

SEQ ID NO: 11838 - protein, 19 aa, Homo sapiens
  Heavy chain CDR3
ARRYYDILTEGGYYYVLDA

SEQ ID NO: 11839 - protein, 10 aa, Homo sapiens
  Heavy chain CDR3
AGGGNYYGDY

SEQ ID NO: 11840 - protein, 18 aa, Homo sapiens
  Heavy chain CDR3
ARLYYYDSSGYYPDAFDI

SEQ ID NO: 11841 - protein, 14 aa, Homo sapiens
  Heavy chain CDR3
ARYGVWGSCRSLDY

SEQ ID NO: 11842 - protein, 9 aa, Homo sapiens
  Heavy chain CDR3
ARWGIYFDY

SEQ ID NO: 11843 - protein, 18 aa, Homo sapiens
  Heavy chain CDR3
ARLYYYDSNGYYPDAFDI

SEQ ID NO: 11844 - protein, 10 aa, Homo sapiens
  Heavy chain CDR3
AGGGSYYGDY

SEQ ID NO: 11845 - protein, 7 aa, Homo sapiens
  Heavy chain CDR3
AVNPFDY

SEQ ID NO: 11846 - protein, 10 aa, Homo sapiens
  Heavy chain CDR3
TGGGSYYGDY

SEQ ID NO: 11847 - protein, 10 aa, Homo sapiens
  Heavy chain CDR3
AGGGNYYGDF

SEQ ID NO: 11848 - protein, 11 aa, Homo sapiens
  Heavy chain CDR3
ASIVGASGPEI

SEQ ID NO: 11849 - protein, 19 aa, Homo sapiens
  Heavy chain CDR3
ARRYYDIVTEGGYYYVLDV

SEQ ID NO: 11850 - protein, 10 aa, Homo sapiens
  Heavy chain CDR3
AGGGSYYGDH

SEQ ID NO: 11851 - protein, 11 aa, Homo sapiens
  Heavy chain CDR3
AGGGDILTGDY

SEQ ID NO: 11852 - protein, 19 aa, Homo sapiens
  Heavy chain CDR3
ARRYYDILTEGGYYYVLNV

SEQ ID NO: 11853 - protein, 10 aa, Homo sapiens
  Heavy chain CDR3
AGGGNYYGDY

SEQ ID NO: 11854 - protein, 10 aa, Homo sapiens
  Heavy chain CDR3
AGGGSYYGDY

SEQ ID NO: 11855 - protein, 12 aa, Homo sapiens
  Heavy chain CDR3
ARDMDIVATTDY

SEQ ID NO: 11856 - protein, 10 aa, Homo sapiens
  Heavy chain CDR3
ARSGDWYFDL

SEQ ID NO: 11857 - protein, 10 aa, Homo sapiens
  Heavy chain CDR3
AGGGNYYGDY

SEQ ID NO: 11858 - protein, 11 aa, Homo sapiens
  Heavy chain CDR3
VGGGDILTGDY

SEQ ID NO: 11859 - protein, 18 aa, Homo sapiens
  Heavy chain CDR3
ARLYYYDSNGYYPDPFDI

SEQ ID NO: 11860 - protein, 19 aa, Homo sapiens
  Heavy chain CDR3
ARRYYDIWTEGGYYYVLDA

SEQ ID NO: 11861 - protein, 17 aa, Homo sapiens
  Heavy chain CDR3
ARGYCSSTNCFADYFDY

SEQ ID NO: 11862 - protein, 10 aa, Homo sapiens
  Heavy chain CDR3
AGGGNYYGDF

SEQ ID NO: 11863 - protein, 10 aa, Homo sapiens
  Heavy chain CDR3
AGGGNYYGDF

SEQ ID NO: 11864 - protein, 10 aa, Homo sapiens
  Heavy chain CDR3
AGGGNYYGDF

SEQ ID NO: 11865 - protein, 18 aa, Homo sapiens
  Heavy chain CDR3
ARVYYYDSSGYYYEYFDH

SEQ ID NO: 11866 - protein, 10 aa, Homo sapiens
  Heavy chain CDR3
AGGGSYYGDY

SEQ ID NO: 11867 - protein, 19 aa, Homo sapiens
  Heavy chain CDR3
ARRYYDIWTEGGYYYVMDV

SEQ ID NO: 11868 - protein, 14 aa, Homo sapiens
  Heavy chain CDR3
SRWDLRYYYYGMDV

SEQ ID NO: 11869 - protein, 11 aa, Homo sapiens
  Heavy chain CDR3
AGGGDIWTGDY

SEQ ID NO: 11870 - protein, 17 aa, Homo sapiens
  Heavy chain CDR3
ARGDCSTTNCFADYFDY

SEQ ID NO: 11871 - protein, 10 aa, Homo sapiens
  Heavy chain CDR3
AGGGNYYGDF

SEQ ID NO: 11872 - protein, 15 aa, Homo sapiens
  Heavy chain CDR3
ARFYYYGSGGGAFDI

SEQ ID NO: 11873 - protein, 10 aa, Homo sapiens
  Heavy chain CDR3
AGGGNYYGDF

SEQ ID NO: 11874 - protein, 10 aa, Homo sapiens
  Heavy chain CDR3
AGGGNYYGDF

SEQ ID NO: 11875 - protein, 17 aa, Homo sapiens
  Heavy chain CDR3
ARGYCSTTNCFADYFDY

SEQ ID NO: 11876 - protein, 11 aa, Homo sapiens
  Heavy chain CDR3
AGGGDILTGDY

SEQ ID NO: 11877 - protein, 10 aa, Homo sapiens
  Heavy chain CDR3
AGGGSYYGDY

SEQ ID NO: 11878 - protein, 11 aa, Homo sapiens
  Heavy chain CDR3
ARDEGATFFDY

SEQ ID NO: 11879 - protein, 7 aa, Homo sapiens
  Heavy chain CDR3
AVNPFDY

SEQ ID NO: 11880 - protein, 18 aa, Homo sapiens
  Heavy chain CDR3
ARDGDYYGSGSYYHAFDI

SEQ ID NO: 11881 - protein, 10 aa, Homo sapiens
  Heavy chain CDR3
AGGGNYYGDY

SEQ ID NO: 11882 - protein, 10 aa, Homo sapiens
  Heavy chain CDR3
AGGGSYSGDY

SEQ ID NO: 11883 - protein, 10 aa, Homo sapiens
  Heavy chain CDR3
AGGGNYYGDY

SEQ ID NO: 11884 - protein, 10 aa, Homo sapiens
  Heavy chain CDR3
AGGGSYYGDY

SEQ ID NO: 11885 - protein, 10 aa, Homo sapiens
  Heavy chain CDR3
AGGGNYYGDF

SEQ ID NO: 11886 - protein, 14 aa, Homo sapiens
  Heavy chain CDR3
ARGRYFDWLFPFDL

SEQ ID NO: 11887 - protein, 7 aa, Homo sapiens
  Heavy chain CDR3
AVNPFDH

SEQ ID NO: 11888 - protein, 18 aa, Homo sapiens
  Heavy chain CDR3
ARDGDYYGSGSYYHAFDI

SEQ ID NO: 11889 - protein, 10 aa, Homo sapiens
  Heavy chain CDR3
AGGGSYYGDY

SEQ ID NO: 11890 - protein, 10 aa, Homo sapiens
  Heavy chain CDR3
AGGGSYYGDY

SEQ ID NO: 11891 - protein, 10 aa, Homo sapiens
  Heavy chain CDR3
TGGGNYYGDY

SEQ ID NO: 11892 - protein, 10 aa, Homo sapiens
  Heavy chain CDR3
AGGGNYYGDY

SEQ ID NO: 11893 - protein, 10 aa, Homo sapiens
  Heavy chain CDR3
AGGGNYYGDY

SEQ ID NO: 11894 - protein, 18 aa, Homo sapiens
  Heavy chain CDR3
ARDGDYYGSGSYYHAFDI

SEQ ID NO: 11895 - protein, 10 aa, Homo sapiens
  Heavy chain CDR3
AGGGSYSGDY

SEQ ID NO: 11896 - protein, 10 aa, Homo sapiens
  Heavy chain CDR3
AGGGSYYGDY

SEQ ID NO: 11897 - protein, 11 aa, Homo sapiens
  Heavy chain CDR3
ARDEGATVFDY

SEQ ID NO: 11898 - protein, 16 aa, Homo sapiens
  Heavy chain CDR3
ARESLITMVRGVILDY

SEQ ID NO: 11899 - protein, 10 aa, Homo sapiens
  Heavy chain CDR3
AGGGSYYGDY

SEQ ID NO: 11900 - protein, 13 aa, Homo sapiens
  Heavy chain CDR3
AGYGSGRKGWFDP

SEQ ID NO: 11901 - protein, 7 aa, Homo sapiens
  Heavy chain CDR3
AVNPFDY

SEQ ID NO: 11902 - protein, 18 aa, Homo sapiens
  Heavy chain CDR3
ARDGDYYGSGSYYHAFDI

SEQ ID NO: 11903 - protein, 14 aa, Homo sapiens
  Heavy chain CDR3
ARHNWNYYYYGMDV

SEQ ID NO: 11904 - protein, 18 aa, Homo sapiens
  Heavy chain CDR3
ARDGDYYGSGSYYHAFDI

SEQ ID NO: 11905 - protein, 18 aa, Homo sapiens
  Heavy chain CDR3
ARDGDYYGSGSYYHAFDI

SEQ ID NO: 11906 - protein, 18 aa, Homo sapiens
  Heavy chain CDR3
ARDGDYYGSGSYYHAFDI

SEQ ID NO: 11907 - protein, 10 aa, Homo sapiens
  Heavy chain CDR3
AGGGNYYGDY

SEQ ID NO: 11908 - protein, 10 aa, Homo sapiens
  Heavy chain CDR3
AGGGSYYGDY

SEQ ID NO: 11909 - protein, 10 aa, Homo sapiens
  Heavy chain CDR3
AGGGNYYGDF

SEQ ID NO: 11910 - protein, 11 aa, Homo sapiens
  Heavy chain CDR3
ARDEGATFFDY

SEQ ID NO: 11911 - protein, 18 aa, Homo sapiens
  Heavy chain CDR3
ARDGDYYGSGSYYHAFDI

SEQ ID NO: 11912 - protein, 8 aa, Homo sapiens
  Heavy chain CDR3
ARGGGLDV

SEQ ID NO: 11913 - protein, 19 aa, Homo sapiens
  Heavy chain CDR3
ARDGDYYGSGSYYSDAFDI

SEQ ID NO: 11914 - protein, 10 aa, Homo sapiens
  Heavy chain CDR3
AGGGSYYGDY

SEQ ID NO: 11915 - protein, 10 aa, Homo sapiens
  Heavy chain CDR3
AGGGSYYGDY

SEQ ID NO: 11916 - protein, 18 aa, Homo sapiens
  Heavy chain CDR3
ARDGDYYGSGSYYHAFDI

SEQ ID NO: 11917 - protein, 18 aa, Homo sapiens
  Heavy chain CDR3
ARDHYDILTGYYKGGFDY

SEQ ID NO: 11918 - protein, 7 aa, Homo sapiens
  Heavy chain CDR3
VCNPFDY

SEQ ID NO: 11919 - protein, 10 aa, Homo sapiens
  Heavy chain CDR3
AGGGDYYGDY

SEQ ID NO: 11920 - protein, 15 aa, Homo sapiens
  Heavy chain CDR3
SRDGSHGDYYYGMDV

SEQ ID NO: 11921 - protein, 15 aa, Homo sapiens
  Heavy chain CDR3
VRDGAVADYYYGMDV

SEQ ID NO: 11922 - protein, 10 aa, Homo sapiens
  Heavy chain CDR3
AGGGSYYGDY

SEQ ID NO: 11923 - protein, 10 aa, Homo sapiens
  Heavy chain CDR3
AKDQWYYFVY

SEQ ID NO: 11924 - protein, 15 aa, Homo sapiens
  Heavy chain CDR3
ARDGAVADYYYVMDV

SEQ ID NO: 11925 - protein, 14 aa, Homo sapiens
  Heavy chain CDR3
ARDDYYISGSSFDY

SEQ ID NO: 11926 - protein, 14 aa, Homo sapiens
  Heavy chain CDR3
ARDDYYVSGSSFDY

SEQ ID NO: 11927 - protein, 18 aa, Homo sapiens
  Heavy chain CDR3
ARDHYDILTGYYEGGFDY

SEQ ID NO: 11928 - protein, 18 aa, Homo sapiens
  Heavy chain CDR3
ARDHYDTLTGYYKGGFDY

SEQ ID NO: 11929 - protein, 15 aa, Homo sapiens
  Heavy chain CDR3
ARDGSHGDYYYGMDV

SEQ ID NO: 11930 - protein, 18 aa, Homo sapiens
  Heavy chain CDR3
ARDHYDSLTGYYKGGFDY

SEQ ID NO: 11931 - protein, 15 aa, Homo sapiens
  Heavy chain CDR3
ARDGSHGDYYYGMDV

SEQ ID NO: 11932 - protein, 15 aa, Homo sapiens
  Heavy chain CDR3
VRDGAVSDYYYGMDV

SEQ ID NO: 11933 - protein, 18 aa, Homo sapiens
  Heavy chain CDR3
ARDHYDILTGYYKGGFDV

SEQ ID NO: 11934 - protein, 18 aa, Homo sapiens
  Heavy chain CDR3
ARDHYDIWTGYYKGGFDY

SEQ ID NO: 11935 - protein, 18 aa, Homo sapiens
  Heavy chain CDR3
ARDQYDILTGYYKGGFDY

SEQ ID NO: 11936 - protein, 18 aa, Homo sapiens
  Heavy chain CDR3
ARDHDDILTGYYKGGFDY

SEQ ID NO: 11937 - protein, 18 aa, Homo sapiens
  Heavy chain CDR3
ARDNYDILTGYYKGGFDY

SEQ ID NO: 11938 - protein, 18 aa, Homo sapiens
  Heavy chain CDR3
ARDHYDMLTGYYKGGFDY

SEQ ID NO: 11939 - protein, 18 aa, Homo sapiens
  Heavy chain CDR3
ARAHYDILTGYYKGGFDY

SEQ ID NO: 11940 - protein, 7 aa, Homo sapiens
  Heavy chain CDR3
VCNPFDY

SEQ ID NO: 11941 - protein, 15 aa, Homo sapiens
  Heavy chain CDR3
VRDGAVADYYYGMDV

SEQ ID NO: 11942 - protein, 15 aa, Homo sapiens
  Heavy chain CDR3
ARGMGLGQWLVPFDY

SEQ ID NO: 11943 - protein, 18 aa, Homo sapiens
  Heavy chain CDR3
ARDHYDISTGYYKGGFDY

SEQ ID NO: 11944 - protein, 7 aa, Homo sapiens
  Heavy chain CDR3
VCNPFDY

SEQ ID NO: 11945 - protein, 18 aa, Homo sapiens
  Heavy chain CDR3
ARDHYDILAGYYKGGFDY

SEQ ID NO: 11946 - protein, 18 aa, Homo sapiens
  Heavy chain CDR3
ARDHYDILTGYYKGGFDY

SEQ ID NO: 11947 - protein, 10 aa, Homo sapiens
  Heavy chain CDR3
AGGGNYYGDY

SEQ ID NO: 11948 - protein, 18 aa, Homo sapiens
  Heavy chain CDR3
ARDHYDILTGYYKGGFDY

SEQ ID NO: 11949 - protein, 18 aa, Homo sapiens
  Heavy chain CDR3
ARRFIALTGNDYNYGMDV

SEQ ID NO: 11950 - protein, 14 aa, Homo sapiens
  Heavy chain CDR3
ARNYGSGSYYPLDY

SEQ ID NO: 11951 - protein, 16 aa, Homo sapiens
  Heavy chain CDR3
ARWDYYGSGSLNWFDP

SEQ ID NO: 11952 - protein, 9 aa, Homo sapiens
  Heavy chain CDR3
ARDELGMRI

SEQ ID NO: 11953 - protein, 18 aa, Homo sapiens
  Heavy chain CDR3
ARDHYDSLTGYYKGGFDY

SEQ ID NO: 11954 - protein, 18 aa, Homo sapiens
  Heavy chain CDR3
ARRFIALTGNDYNYGMDV

SEQ ID NO: 11955 - protein, 18 aa, Homo sapiens
  Heavy chain CDR3
ARRFIARTGNDYNYGMDV

SEQ ID NO: 11956 - protein, 16 aa, Homo sapiens
  Heavy chain CDR3
ARWDYYGSGSLNWFDP

SEQ ID NO: 11957 - protein, 13 aa, Homo sapiens
  Heavy chain CDR3
ATPYSSGWSLFDY

SEQ ID NO: 11958 - protein, 18 aa, Homo sapiens
  Heavy chain CDR3
ARRFIALTGNDYNYGMDV

SEQ ID NO: 11959 - protein, 9 aa, Homo sapiens
  Heavy chain CDR3
ARDNLYFDY

SEQ ID NO: 11960 - protein, 14 aa, Homo sapiens
  Heavy chain CDR3
ARGGAAAVSYGMDV

SEQ ID NO: 11961 - protein, 18 aa, Homo sapiens
  Heavy chain CDR3
ARRFIALTGNDYNYGMDV

SEQ ID NO: 11962 - protein, 14 aa, Homo sapiens
  Heavy chain CDR3
ATGLTGYYKSWFDP

SEQ ID NO: 11963 - protein, 14 aa, Homo sapiens
  Heavy chain CDR3
ARGGAAAVSYGMDV

SEQ ID NO: 11964 - protein, 18 aa, Homo sapiens
  Heavy chain CDR3
ARRFIALTGNDYNYGMDV

SEQ ID NO: 11965 - protein, 14 aa, Homo sapiens
  Heavy chain CDR3
AKDPRIAVAGTFDY

SEQ ID NO: 11966 - protein, 14 aa, Homo sapiens
  Heavy chain CDR3
AREGGFGELLSFDY

SEQ ID NO: 11967 - protein, 18 aa, Homo sapiens
  Heavy chain CDR3
ARRFIALTGNDYNYGMDV

SEQ ID NO: 11968 - protein, 11 aa, Homo sapiens
  Heavy chain CDR3
ATAIGYNGMDV

SEQ ID NO: 11969 - protein, 14 aa, Homo sapiens
  Heavy chain CDR3
AREGGFGELLSFDY

SEQ ID NO: 11970 - protein, 14 aa, Homo sapiens
  Heavy chain CDR3
AREGGFGELLSFDY

SEQ ID NO: 11971 - protein, 16 aa, Homo sapiens
  Heavy chain CDR3
ARWDYYGSGSLNWFDP

SEQ ID NO: 11972 - protein, 10 aa, Homo sapiens
  Heavy chain CDR3
AGGWNYYGDY

SEQ ID NO: 11973 - protein, 18 aa, Homo sapiens
  Heavy chain CDR3
ARRFIALTGNDYNYGMEV

SEQ ID NO: 11974 - protein, 10 aa, Homo sapiens
  Heavy chain CDR3
AGGGSYYGDY

SEQ ID NO: 11975 - protein, 10 aa, Homo sapiens
  Heavy chain CDR3
AGGGNYYGDY

SEQ ID NO: 11976 - protein, 18 aa, Homo sapiens
  Heavy chain CDR3
ARGGYFDPYGDYYYGMDV

SEQ ID NO: 11977 - protein, 10 aa, Homo sapiens
  Heavy chain CDR3
AGGGNYYGDY

SEQ ID NO: 11978 - protein, 10 aa, Homo sapiens
  Heavy chain CDR3
AGGGNYYSDY

SEQ ID NO: 11979 - protein, 10 aa, Homo sapiens
  Heavy chain CDR3
AGGGDYYGDY

SEQ ID NO: 11980 - protein, 10 aa, Homo sapiens
  Heavy chain CDR3
AGGGNYSGDY

SEQ ID NO: 11981 - protein, 10 aa, Homo sapiens
  Heavy chain CDR3
AGGGNYYVDY

SEQ ID NO: 11982 - protein, 11 aa, Homo sapiens
  Heavy chain CDR3
ANDILTGSFDY

SEQ ID NO: 11983 - protein, 11 aa, Homo sapiens
  Heavy chain CDR3
ALHYYGTVFDP

SEQ ID NO: 11984 - protein, 18 aa, Homo sapiens
  Heavy chain CDR3
TKRDYYGSGSWVYYGMDV

SEQ ID NO: 11985 - protein, 16 aa, Homo sapiens
  Heavy chain CDR3
ARDQHYYGSGSYYKDY

SEQ ID NO: 11986 - protein, 16 aa, Homo sapiens
  Heavy chain CDR3
AKDSGSYHYYYYGMDV

SEQ ID NO: 11987 - protein, 16 aa, Homo sapiens
  Heavy chain CDR3
ARDYPTSVTTYWFFDL

SEQ ID NO: 11988 - protein, 10 aa, Homo sapiens
  Heavy chain CDR3
ARGLTGDFDY

SEQ ID NO: 11989 - protein, 13 aa, Homo sapiens
  Heavy chain CDR3
ARYYDILTGYFVY

SEQ ID NO: 11990 - protein, 17 aa, Homo sapiens
  Heavy chain CDR3
ARGGYSSGWYVLYYFDY

SEQ ID NO: 11991 - protein, 17 aa, Homo sapiens
  Heavy chain CDR3
ARVGYSSGWYVLYYFDY

SEQ ID NO: 11992 - protein, 12 aa, Homo sapiens
  Heavy chain CDR3
ARDPYEGYGMDV

SEQ ID NO: 11993 - protein, 12 aa, Homo sapiens
  Heavy chain CDR3
VYSGSYLYYFDY

SEQ ID NO: 11994 - protein, 16 aa, Homo sapiens
  Heavy chain CDR3
ARDCPTSVTTYWFFDL

SEQ ID NO: 11995 - protein, 16 aa, Homo sapiens
  Heavy chain CDR3
ARDYPTSVTTYWFFDL

SEQ ID NO: 11996 - protein, 16 aa, Homo sapiens
  Heavy chain CDR3
ARDYPTSVTTYWYFDL

SEQ ID NO: 11997 - protein, 15 aa, Homo sapiens
  Heavy chain CDR3
ARRDYYGSGKSYFDL

SEQ ID NO: 11998 - protein, 12 aa, Homo sapiens
  Heavy chain CDR3
ARRSGFGEPPKY

SEQ ID NO: 11999 - protein, 15 aa, Homo sapiens
  Heavy chain CDR3
ARDGSHGDYYYGMDV

SEQ ID NO: 12000 - protein, 10 aa, Homo sapiens
  Heavy chain CDR3
AGGGNYYGDY

SEQ ID NO: 12001 - protein, 15 aa, Homo sapiens
  Heavy chain CDR3
ARDGSHGDYYYGMDV

SEQ ID NO: 12002 - protein, 10 aa, Homo sapiens
  Heavy chain CDR3
AGGGNYYGDY

SEQ ID NO: 12003 - protein, 10 aa, Homo sapiens
  Heavy chain CDR3
AGGGSYYGDY

SEQ ID NO: 12004 - protein, 10 aa, Homo sapiens
  Heavy chain CDR3
AGGGSYWGDY

SEQ ID NO: 12005 - protein, 10 aa, Homo sapiens
  Heavy chain CDR3
AGGGNYYGDY

SEQ ID NO: 12006 - protein, 10 aa, Homo sapiens
  Heavy chain CDR3
AGGGNYYGDY

SEQ ID NO: 12007 - protein, 10 aa, Homo sapiens
  Heavy chain CDR3
AGGGSYWGDY

SEQ ID NO: 12008 - protein, 7 aa, Homo sapiens
  Heavy chain CDR3
ATNSDDY

SEQ ID NO: 12009 - protein, 10 aa, Homo sapiens
  Heavy chain CDR3
ATSSGSYWDY

SEQ ID NO: 12010 - protein, 11 aa, Homo sapiens
  Heavy chain CDR3
ANDILTGSFDY

SEQ ID NO: 12011 - protein, 16 aa, Homo sapiens
  Heavy chain CDR3
AKDSGSYHYYYYGMDV

SEQ ID NO: 12012 - protein, 9 aa, Homo sapiens
  Heavy chain CDR3
ARGGDIGDY

SEQ ID NO: 12013 - protein, 10 aa, Homo sapiens
  Heavy chain CDR3
TRTAAGHFDY

SEQ ID NO: 12014 - protein, 12 aa, Homo sapiens
  Heavy chain CDR3
ARGSIAAAGTDY

SEQ ID NO: 12015 - protein, 10 aa, Homo sapiens
  Heavy chain CDR3
AGGGNYYGDY

SEQ ID NO: 12016 - protein, 10 aa, Homo sapiens
  Heavy chain CDR3
AGGGNYYGDY

SEQ ID NO: 12017 - protein, 10 aa, Homo sapiens
  Heavy chain CDR3
AGGGNYYGDY

SEQ ID NO: 12018 - protein, 10 aa, Homo sapiens
  Heavy chain CDR3
AGGGNYYGDY

SEQ ID NO: 12019 - protein, 10 aa, Homo sapiens
  Heavy chain CDR3
AGGGNYYGDY

SEQ ID NO: 12020 - protein, 10 aa, Homo sapiens
  Heavy chain CDR3
AGGGNYYGDY

SEQ ID NO: 12021 - protein, 10 aa, Homo sapiens
  Heavy chain CDR3
AGGGNYYGDY

SEQ ID NO: 12022 - protein, 10 aa, Homo sapiens
  Heavy chain CDR3
AGGGSYYGDY

SEQ ID NO: 12023 - protein, 10 aa, Homo sapiens
  Heavy chain CDR3
AGGGNYYGDY

SEQ ID NO: 12024 - protein, 10 aa, Homo sapiens
  Heavy chain CDR3
AGGGNYYGDY

SEQ ID NO: 12025 - protein, 10 aa, Homo sapiens
  Heavy chain CDR3
AGGGNYYGDY

SEQ ID NO: 12026 - protein, 10 aa, Homo sapiens
  Heavy chain CDR3
AGGGNYYGDY

SEQ ID NO: 12027 - protein, 10 aa, Homo sapiens
  Heavy chain CDR3
AGGGSYYGDY

SEQ ID NO: 12028 - protein, 10 aa, Homo sapiens
  Heavy chain CDR3
AGGGNYYGDY

SEQ ID NO: 12029 - protein, 10 aa, Homo sapiens
  Heavy chain CDR3
AGGGNYDGDY

SEQ ID NO: 12030 - protein, 10 aa, Homo sapiens
  Heavy chain CDR3
AGGGNYNGDY

SEQ ID NO: 12031 - protein, 10 aa, Homo sapiens
  Heavy chain CDR3
AGGGNYYGDD

SEQ ID NO: 12032 - protein, 10 aa, Homo sapiens
  Heavy chain CDR3
AGGANYWGDF

SEQ ID NO: 12033 - protein, 10 aa, Homo sapiens
  Heavy chain CDR3
AGGGNYCGDF

SEQ ID NO: 12034 - protein, 10 aa, Homo sapiens
  Heavy chain CDR3
AGGGNYGGDF

SEQ ID NO: 12035 - protein, 10 aa, Homo sapiens
  Heavy chain CDR3
AGGGNYWEDF

SEQ ID NO: 12036 - protein, 10 aa, Homo sapiens
  Heavy chain CDR3
AGGGNYWGDC

SEQ ID NO: 12037 - protein, 10 aa, Homo sapiens
  Heavy chain CDR3
AGGGNYWGDF

SEQ ID NO: 12038 - protein, 10 aa, Homo sapiens
  Heavy chain CDR3
AGGGNYWGDV

SEQ ID NO: 12039 - protein, 10 aa, Homo sapiens
  Heavy chain CDR3
AGGGNYWGDY

SEQ ID NO: 12040 - protein, 10 aa, Homo sapiens
  Heavy chain CDR3
AGGGNYWRDF

SEQ ID NO: 12041 - protein, 10 aa, Homo sapiens
  Heavy chain CDR3
AGGVNYWGDF

SEQ ID NO: 12042 - protein, 10 aa, Homo sapiens
  Heavy chain CDR3
AGGWNYWGDF

SEQ ID NO: 12043 - protein, 10 aa, Homo sapiens
  Heavy chain CDR3
AVGGNYWGDF

SEQ ID NO: 12044 - protein, 12 aa, Homo sapiens
  Heavy chain CDR3
VYSGSYLYCFDY

SEQ ID NO: 12045 - protein, 12 aa, Homo sapiens
  Heavy chain CDR3
ATPEGYVVAFDI

SEQ ID NO: 12046 - protein, 10 aa, Homo sapiens
  Heavy chain CDR3
AGGGNYYGDY

SEQ ID NO: 12047 - protein, 10 aa, Homo sapiens
  Heavy chain CDR3
AGGGSYYGDY

SEQ ID NO: 12048 - protein, 10 aa, Homo sapiens
  Heavy chain CDR3
AGGGNYYGDY

SEQ ID NO: 12049 - protein, 10 aa, Homo sapiens
  Heavy chain CDR3
AGGGSYWGDY

SEQ ID NO: 12050 - protein, 10 aa, Homo sapiens
  Heavy chain CDR3
AGGGSYWGDY

SEQ ID NO: 12051 - protein, 10 aa, Homo sapiens
  Heavy chain CDR3
AGGGSYWGDY

SEQ ID NO: 12052 - protein, 10 aa, Homo sapiens
  Heavy chain CDR3
AGGGSYWGDY

SEQ ID NO: 12053 - protein, 10 aa, Homo sapiens
  Heavy chain CDR3
AGGGSYWGDY

SEQ ID NO: 12054 - protein, 10 aa, Homo sapiens
  Heavy chain CDR3
AGGGSYWGDY

SEQ ID NO: 12055 - protein, 10 aa, Homo sapiens
  Heavy chain CDR3
AGGGSYWGDY

SEQ ID NO: 12056 - protein, 10 aa, Homo sapiens
  Heavy chain CDR3
AGGGSYWGDY

SEQ ID NO: 12057 - protein, 24 aa, Homo sapiens
  Heavy chain CDR3
ARDRIYCSSTRCIGFGYYYYGMDV

SEQ ID NO: 12058 - protein, 10 aa, Homo sapiens
  Heavy chain CDR3
AGGGSYWGDY

SEQ ID NO: 12059 - protein, 10 aa, Homo sapiens
  Heavy chain CDR3
AGGGNYYGDY

SEQ ID NO: 12060 - protein, 10 aa, Homo sapiens
  Heavy chain CDR3
AGGGSYYGDY

SEQ ID NO: 12061 - protein, 10 aa, Homo sapiens
  Heavy chain CDR3
AGGGSYWGDY

SEQ ID NO: 12062 - protein, 10 aa, Homo sapiens
  Heavy chain CDR3
AGGGNYYGDY

SEQ ID NO: 12063 - protein, 10 aa, Homo sapiens
  Heavy chain CDR3
AGGGNYYGDY

SEQ ID NO: 12064 - protein, 10 aa, Homo sapiens
  Heavy chain CDR3
AGGGNYYGDY

SEQ ID NO: 12065 - protein, 10 aa, Homo sapiens
  Heavy chain CDR3
AGGGNYYGDY

SEQ ID NO: 12066 - protein, 10 aa, Homo sapiens
  Heavy chain CDR3
AGGGNYYGDY

SEQ ID NO: 12067 - protein, 10 aa, Homo sapiens
  Heavy chain CDR3
AGGGNYYGDY

SEQ ID NO: 12068 - protein, 10 aa, Homo sapiens
  Heavy chain CDR3
AGGGNYYGDY

SEQ ID NO: 12069 - protein, 10 aa, Homo sapiens
  Heavy chain CDR3
AGGGNYYGDY

SEQ ID NO: 12070 - protein, 10 aa, Homo sapiens
  Heavy chain CDR3
AGGGNYYGDY

SEQ ID NO: 12071 - protein, 10 aa, Homo sapiens
  Heavy chain CDR3
AGGGNYYGDY

SEQ ID NO: 12072 - protein, 10 aa, Homo sapiens
  Heavy chain CDR3
AGGGNYYGDY

SEQ ID NO: 12073 - protein, 10 aa, Homo sapiens
  Heavy chain CDR3
AGGGNYYGDY

SEQ ID NO: 12074 - protein, 10 aa, Homo sapiens
  Heavy chain CDR3
AGGGNYYGDY

SEQ ID NO: 12075 - protein, 10 aa, Homo sapiens
  Heavy chain CDR3
AGAGNYYGDY

SEQ ID NO: 12076 - protein, 10 aa, Homo sapiens
  Heavy chain CDR3
AGCGNYYGDY

SEQ ID NO: 12077 - protein, 10 aa, Homo sapiens
  Heavy chain CDR3
AGGENYYGDY

SEQ ID NO: 12078 - protein, 10 aa, Homo sapiens
  Heavy chain CDR3
AGGGDYYGDY

SEQ ID NO: 12079 - protein, 10 aa, Homo sapiens
  Heavy chain CDR3
AGGGNDYGDY

SEQ ID NO: 12080 - protein, 10 aa, Homo sapiens
  Heavy chain CDR3
AGGGNYCGDY

SEQ ID NO: 12081 - protein, 10 aa, Homo sapiens
  Heavy chain CDR3
AGGGNYDGDY

SEQ ID NO: 12082 - protein, 10 aa, Homo sapiens
  Heavy chain CDR3
AGGGNYSGDY

SEQ ID NO: 12083 - protein, 10 aa, Homo sapiens
  Heavy chain CDR3
AGGGNYYCDY

SEQ ID NO: 12084 - protein, 10 aa, Homo sapiens
  Heavy chain CDR3
AGGGNYYDDY

SEQ ID NO: 12085 - protein, 10 aa, Homo sapiens
  Heavy chain CDR3
AGGGNYYGAY

SEQ ID NO: 12086 - protein, 10 aa, Homo sapiens
  Heavy chain CDR3
AGGGNYYGDF

SEQ ID NO: 12087 - protein, 10 aa, Homo sapiens
  Heavy chain CDR3
AGGGSYYGDY

SEQ ID NO: 12088 - protein, 10 aa, Homo sapiens
  Heavy chain CDR3
AGGGTYYGDY

SEQ ID NO: 12089 - protein, 10 aa, Homo sapiens
  Heavy chain CDR3
AGGVNYYGDY

SEQ ID NO: 12090 - protein, 10 aa, Homo sapiens
  Heavy chain CDR3
AGGWNYYGDY

SEQ ID NO: 12091 - protein, 10 aa, Homo sapiens
  Heavy chain CDR3
SGGGNYYGDY

SEQ ID NO: 12092 - protein, 10 aa, Homo sapiens
  Heavy chain CDR3
AGGGNYYGDY

SEQ ID NO: 12093 - protein, 15 aa, Homo sapiens
  Heavy chain CDR3
ARDGSHGDYYYGMDV

SEQ ID NO: 12094 - protein, 10 aa, Homo sapiens
  Heavy chain CDR3
AGGGNYYGDY

SEQ ID NO: 12095 - protein, 10 aa, Homo sapiens
  Heavy chain CDR3
AGGGNYYGDY

SEQ ID NO: 12096 - protein, 15 aa, Homo sapiens
  Heavy chain CDR3
ARDGSHGDYYYGMDV

SEQ ID NO: 12097 - protein, 11 aa, Homo sapiens
  Heavy chain CDR3
ANDILTGSFDY

SEQ ID NO: 12098 - protein, 15 aa, Homo sapiens
  Heavy chain CDR3
ARDGSHGDYYYGMDV

SEQ ID NO: 12099 - protein, 13 aa, Homo sapiens
  Heavy chain CDR3
ARGYYGSGGMRDY

SEQ ID NO: 12100 - protein, 24 aa, Homo sapiens
  Heavy chain CDR3
ARDRIYCSSTRCIGFGYYYYGMDV

SEQ ID NO: 12101 - protein, 15 aa, Homo sapiens
  Heavy chain CDR3
ARDGSHGDYYYGMDV

SEQ ID NO: 12102 - protein, 15 aa, Homo sapiens
  Heavy chain CDR3
ARDGSHGDYYYGMDV

SEQ ID NO: 12103 - protein, 12 aa, Homo sapiens
  Heavy chain CDR3
ARDPYEGYGMDV

SEQ ID NO: 12104 - protein, 8 aa, Homo sapiens
  Heavy chain CDR3
ARGGGFDY

SEQ ID NO: 12105 - protein, 15 aa, Homo sapiens
  Heavy chain CDR3
ARVLLWFGELWYFDL

SEQ ID NO: 12106 - protein, 24 aa, Homo sapiens
  Heavy chain CDR3
ARDRIYCSSSKCIGFGYYFYGLDV

SEQ ID NO: 12107 - protein, 24 aa, Homo sapiens
  Heavy chain CDR3
ARDRIYCSSTRCIGFGYYYYGMDV

SEQ ID NO: 12108 - protein, 24 aa, Homo sapiens
  Heavy chain CDR3
ARDRIYCSSTRCIGFGYYYYGMDV

SEQ ID NO: 12109 - protein, 24 aa, Homo sapiens
  Heavy chain CDR3
ARDRIYCSSTRCIGFGYYYYGMDV

SEQ ID NO: 12110 - protein, 12 aa, Homo sapiens
  Heavy chain CDR3
VYSGSYLYYFDY

SEQ ID NO: 12111 - protein, 24 aa, Homo sapiens
  Heavy chain CDR3
ARDRIYCSSTRCIGFGYYYYGMDV

SEQ ID NO: 12112 - protein, 24 aa, Homo sapiens
  Heavy chain CDR3
ARDRIYCSSTRCIGFGYYYYGMDV

SEQ ID NO: 12113 - protein, 24 aa, Homo sapiens
  Heavy chain CDR3
ARDRIYCSSTRCIGFGYYYYGMDV

SEQ ID NO: 12114 - protein, 10 aa, Homo sapiens
  Heavy chain CDR3
AGGGSYWGDY

SEQ ID NO: 12115 - protein, 24 aa, Homo sapiens
  Heavy chain CDR3
ARDRIDCSSTRCIGFGYYYYGMDV

SEQ ID NO: 12116 - protein, 24 aa, Homo sapiens
  Heavy chain CDR3
ARDRIYCSSARCIGFGYYYYGMDV

SEQ ID NO: 12117 - protein, 24 aa, Homo sapiens
  Heavy chain CDR3
ARDRIYCSSSRCIGFGYYYYGMDV

SEQ ID NO: 12118 - protein, 24 aa, Homo sapiens
  Heavy chain CDR3
ARDRIYCSSTRCIGFGYYYYGMDV

SEQ ID NO: 12119 - protein, 24 aa, Homo sapiens
  Heavy chain CDR3
ARDRIYCSSTRCVGFGYYYYGMDV

SEQ ID NO: 12120 - protein, 24 aa, Homo sapiens
  Heavy chain CDR3
ARDRIYWSSTRCIGFGYYYYGMDV

SEQ ID NO: 12121 - protein, 24 aa, Homo sapiens
  Heavy chain CDR3
ARDRRYCSSTRCIGFGYYYYGMDV

SEQ ID NO: 12122 - protein, 24 aa, Homo sapiens
  Heavy chain CDR3
ARDRIYCSSTRCIGFGYYYYGMDV

SEQ ID NO: 12123 - protein, 24 aa, Homo sapiens
  Heavy chain CDR3
ARDRIYCSSTRCIGFGYYYYGMDV

SEQ ID NO: 12124 - protein, 15 aa, Homo sapiens
  Heavy chain CDR3
ARDGSHGDYYYGMDV

SEQ ID NO: 12125 - protein, 15 aa, Homo sapiens
  Heavy chain CDR3
ARDGSHGDYYYVMDL

SEQ ID NO: 12126 - protein, 13 aa, Homo sapiens
  Heavy chain CDR3
ASVLLWFGELFDY

SEQ ID NO: 12127 - protein, 15 aa, Homo sapiens
  Heavy chain CDR3
ARDGSHGDYYYGMDV

SEQ ID NO: 12128 - protein, 15 aa, Homo sapiens
  Heavy chain CDR3
AKEMMTVTGKGYFDY

SEQ ID NO: 12129 - protein, 17 aa, Homo sapiens
  Heavy chain CDR3
ARGDYDFLTGYYNEIDY

SEQ ID NO: 12130 - protein, 14 aa, Homo sapiens
  Heavy chain CDR3
ASDILTGYYTGLDV

SEQ ID NO: 12131 - protein, 15 aa, Homo sapiens
  Heavy chain CDR3
ARDGSHGDYYYGMDV

SEQ ID NO: 12132 - protein, 15 aa, Homo sapiens
  Heavy chain CDR3
ARDGSHGDYYYGMDV

SEQ ID NO: 12133 - protein, 11 aa, Homo sapiens
  Heavy chain CDR3
ANDILTGSFDY

SEQ ID NO: 12134 - protein, 11 aa, Homo sapiens
  Heavy chain CDR3
ANDILTGSFDY

SEQ ID NO: 12135 - protein, 11 aa, Homo sapiens
  Heavy chain CDR3
ANDILTGSFDY

SEQ ID NO: 12136 - protein, 11 aa, Homo sapiens
  Heavy chain CDR3
ANDILTGSFDY

SEQ ID NO: 12137 - protein, 11 aa, Homo sapiens
  Heavy chain CDR3
ANDILTGSFDY

SEQ ID NO: 12138 - protein, 11 aa, Homo sapiens
  Heavy chain CDR3
ANDILTGSFDY

SEQ ID NO: 12139 - protein, 11 aa, Homo sapiens
  Heavy chain CDR3
ANDILTGSFDY

SEQ ID NO: 12140 - protein, 11 aa, Homo sapiens
  Heavy chain CDR3
ANDILTGSFDY

SEQ ID NO: 12141 - protein, 11 aa, Homo sapiens
  Heavy chain CDR3
AIDILTGSFDY

SEQ ID NO: 12142 - protein, 11 aa, Homo sapiens
  Heavy chain CDR3
ANDILTGSFDY

SEQ ID NO: 12143 - protein, 15 aa, Homo sapiens
  Heavy chain CDR3
ARDGSHGDYYYGMDV

SEQ ID NO: 12144 - protein, 11 aa, Homo sapiens
  Heavy chain CDR3
ANDILTGSFDY

SEQ ID NO: 12145 - protein, 15 aa, Homo sapiens
  Heavy chain CDR3
ARDGSHGDYYYGMDV

SEQ ID NO: 12146 - protein, 14 aa, Homo sapiens
  Heavy chain CDR3
ARGGSGSSYWYFDL

SEQ ID NO: 12147 - protein, 16 aa, Homo sapiens
  Heavy chain CDR3
ARDQYYYDSGSYYKDY

SEQ ID NO: 12148 - protein, 15 aa, Homo sapiens
  Heavy chain CDR3
ARDGSHGDYYYGMDV

SEQ ID NO: 12149 - protein, 16 aa, Homo sapiens
  Heavy chain CDR3
ARDYPTSVTTYWFFDL

SEQ ID NO: 12150 - protein, 15 aa, Homo sapiens
  Heavy chain CDR3
ARDGSHGDYYYGMDV

SEQ ID NO: 12151 - protein, 15 aa, Homo sapiens
  Heavy chain CDR3
ARDGAVADYYYGMDV

SEQ ID NO: 12152 - protein, 15 aa, Homo sapiens
  Heavy chain CDR3
ARDGAVADYYYGMDV

SEQ ID NO: 12153 - protein, 15 aa, Homo sapiens
  Heavy chain CDR3
ARDGSHGDYYYGMDV

SEQ ID NO: 12154 - protein, 15 aa, Homo sapiens
  Heavy chain CDR3
VRDGAVADYYYGMDV

SEQ ID NO: 12155 - protein, 15 aa, Homo sapiens
  Heavy chain CDR3
VRDGSHGDYYYGMDV

SEQ ID NO: 12156 - protein, 15 aa, Homo sapiens
  Heavy chain CDR3
ARDGSHGDYYYGMDV

SEQ ID NO: 12157 - protein, 15 aa, Homo sapiens
  Heavy chain CDR3
ARDGSHGDYYYGMDV

SEQ ID NO: 12158 - protein, 15 aa, Homo sapiens
  Heavy chain CDR3
ARDGSHGDYYYGMDV

SEQ ID NO: 12159 - protein, 15 aa, Homo sapiens
  Heavy chain CDR3
ARDGSHGDYYYGMDV

SEQ ID NO: 12160 - protein, 15 aa, Homo sapiens
  Heavy chain CDR3
ARDGSHGDYYYGMDV

SEQ ID NO: 12161 - protein, 15 aa, Homo sapiens
  Heavy chain CDR3
ARDGSHGDYYYGMDV

SEQ ID NO: 12162 - protein, 17 aa, Homo sapiens
  Heavy chain CDR3
ARDDDVLTGYYEWYFDL

SEQ ID NO: 12163 - protein, 15 aa, Homo sapiens
  Heavy chain CDR3
ARDGSHGDYYYGMDV

SEQ ID NO: 12164 - protein, 18 aa, Homo sapiens
  Heavy chain CDR3
TKRDYYGSGSWVYYGMDV

SEQ ID NO: 12165 - protein, 15 aa, Homo sapiens
  Heavy chain CDR3
ARDGSHGDYYYGMDV

SEQ ID NO: 12166 - protein, 15 aa, Homo sapiens
  Heavy chain CDR3
ARDGSHGDYYYGMDV

SEQ ID NO: 12167 - protein, 15 aa, Homo sapiens
  Heavy chain CDR3
ARDGSHGDYYYGMDV

SEQ ID NO: 12168 - protein, 10 aa, Homo sapiens
  Heavy chain CDR3
AGGGNYWGDF

SEQ ID NO: 12169 - protein, 11 aa, Homo sapiens
  Heavy chain CDR3
ANDILTGSFDY

SEQ ID NO: 12170 - protein, 12 aa, Homo sapiens
  Heavy chain CDR3
ARDELFYWYFDL

SEQ ID NO: 12171 - protein, 15 aa, Homo sapiens
  Heavy chain CDR3
ARDGSHGAYYYGMDV

SEQ ID NO: 12172 - protein, 15 aa, Homo sapiens
  Heavy chain CDR3
ARDGSHGDDYYGMDV

SEQ ID NO: 12173 - protein, 15 aa, Homo sapiens
  Heavy chain CDR3
ARDGSHGDYYDGMDV

SEQ ID NO: 12174 - protein, 15 aa, Homo sapiens
  Heavy chain CDR3
ARDGSHGDYYYGMDV

SEQ ID NO: 12175 - protein, 15 aa, Homo sapiens
  Heavy chain CDR3
ASDGSHGDYYYGMDV

SEQ ID NO: 12176 - protein, 14 aa, Homo sapiens
  Heavy chain CDR3
ASDILTGYYTGLDV

SEQ ID NO: 12177 - protein, 15 aa, Homo sapiens
  Heavy chain CDR3
VRDGSHGDYYYGMDV

SEQ ID NO: 12178 - protein, 15 aa, Homo sapiens
  Heavy chain CDR3
ARDGSHGDYYYGMDV

SEQ ID NO: 12179 - protein, 15 aa, Homo sapiens
  Heavy chain CDR3
ARDGSHGDYYYGMDV

SEQ ID NO: 12180 - protein, 15 aa, Homo sapiens
  Heavy chain CDR3
ARDGSHGDYYYGMDV

SEQ ID NO: 12181 - protein, 15 aa, Homo sapiens
  Heavy chain CDR3
ARDGSHGDYYYGMDV

SEQ ID NO: 12182 - protein, 15 aa, Homo sapiens
  Heavy chain CDR3
ARDGSHGDYYYGMDV

SEQ ID NO: 12183 - protein, 23 aa, Homo sapiens
  Heavy chain CDR3
ARGGDIVVVPAAMRDYYYYGMDV

SEQ ID NO: 12184 - protein, 9 aa, Artificial Sequence
  Description of Artificial Sequence: Synthetic peptide
  MOD_RES (1)..(1): Leu or Gln
  MOD_RES (3)..(3): His, Tyr, Phe or Asp
  MOD_RES (4)..(4): Asn or Tyr
  MOD_RES (5)..(5): Ser, Ile or Asn
  MOD_RES (8)..(8): Leu, Trp, Tyr or Arg
XQXXXYPXT

SEQ ID NO: 12185 - protein, 8 aa, Artificial Sequence
  Description of Artificial Sequence: Synthetic peptide
  MOD_RES (2)..(2): Phe or Tyr
  MOD_RES (5)..(5): Ser or Ala
  MOD_RES (6)..(6): Asn, Asp, Thr, Ser or Ile
GXTFXXYG

SEQ ID NO: 12186 - protein, 8 aa, Artificial Sequence
  Description of Artificial Sequence: Synthetic peptide
  MOD_RES (6)..(6): Ser or Thr
IWYDGXNK

SEQ ID NO: 12187 - protein, 8 aa, Artificial Sequence
  Description of Artificial Sequence: Synthetic peptide
  MOD_RES (8)..(8): Ile or Ser
ISAYSDNX

SEQ ID NO: 12188 - protein, 10 aa, Artificial Sequence
  Description of Artificial Sequence: Synthetic peptide
  MOD_RES (5)..(5): Asn or Ser
  MOD_RES (7)..(7): Tyr or Trp
  MOD_RES (10)..(10): Tyr or Phe
AGGGXYXGDX

SEQ ID NO: 12189 - protein, 15 aa, Artificial Sequence
  Description of Artificial Sequence: Synthetic peptide
  MOD_RES (1)..(1): Ala or Val
XRDGSHGDYYYGMDV

SEQ ID NO: 12190 - protein, 5 aa, Artificial Sequence
  Description of Artificial Sequence: Synthetic peptide
  See specification as filed for detailed description of substitutions and preferred embodiments
GGGGS

SEQ ID NO: 12191 - protein, 8 aa, Artificial Sequence
  Description of Artificial Sequence: Synthetic peptide
DYKDDDDK

SEQ ID NO: 12192 - protein, 5 aa, Homo sapiens
CPSCP

SEQ ID NO: 12193 - protein, 5 aa, Homo sapiens
CPPCP

SEQ ID NO: 12194 - protein, 9 aa, Homo sapiens
QQRSNWPLT

SEQ ID NO: 12195 - protein, 13 aa, Homo sapiens
ARDRGASRGAFNI

SEQ ID NO: 12196 - protein, 10 aa, Homo sapiens
QQYGSSPPIT

SEQ ID NO: 12197 - protein, 11 aa, Homo sapiens
AISSWYGFFQN

SEQ ID NO: 12198 - protein, 9 aa, Homo sapiens
QQYGSSPYT

SEQ ID NO: 12199 - protein, 15 aa, Homo sapiens
AREGGAYYYFYGMDV

SEQ ID NO: 12200 - protein, 9 aa, Homo sapiens
QQRSNWPFT

SEQ ID NO: 12201 - protein, 15 aa, Homo sapiens
ARGRPTDYYYYGVDV

SEQ ID NO: 12202 - protein, 9 aa, Homo sapiens
QQANSFPLT

SEQ ID NO: 12203 - protein, 13 aa, Homo sapiens
ARDSTLGRGYFDL

SEQ ID NO: 12204 - protein, 9 aa, Homo sapiens
QQRSNWPLT

SEQ ID NO: 12205 - protein, 13 aa, Homo sapiens
ARDRGASRGAFNI

SEQ ID NO: 12206 - protein, 9 aa, Homo sapiens
QQRSNWPLT

SEQ ID NO: 12207 - protein, 11 aa, Homo sapiens
AISSWYGFFQN

SEQ ID NO: 12208 - protein, 9 aa, Homo sapiens
QQRSNWPLT

SEQ ID NO: 12209 - protein, 15 aa, Homo sapiens
AREGGAYYYFYGMDV

SEQ ID NO: 12210 - protein, 10 aa, Homo sapiens
QQYGSSPPIT

SEQ ID NO: 12211 - protein, 13 aa, Homo sapiens
ARDRGASRGAFNI

SEQ ID NO: 12212 - protein, 10 aa, Homo sapiens
QQYGSSPPIT

SEQ ID NO: 12213 - protein, 11 aa, Homo sapiens
AISSWYGFFQN

SEQ ID NO: 12214 - protein, 10 aa, Homo sapiens
QQYGSSPPIT

SEQ ID NO: 12215 - protein, 15 aa, Homo sapiens
AREGGAYYYFYGMDV

SEQ ID NO: 12216 - protein, 9 aa, Homo sapiens
QQYGSSPYT

SEQ ID NO: 12217 - protein, 13 aa, Homo sapiens
ARDRGASRGAFNI

SEQ ID NO: 12218 - protein, 9 aa, Homo sapiens
QQYGSSPYT

SEQ ID NO: 12219 - protein, 11 aa, Homo sapiens
AISSWYGFFQN

SEQ ID NO: 12220 - protein, 9 aa, Homo sapiens
QQYGSSPYT

SEQ ID NO: 12221 - protein, 15 aa, Homo sapiens
AREGGAYYYFYGMDV
